United States Patent Application Publication US 2009/0018031 A1 - sequence listing, part 24

SEQ ID NO: 12690 - DNA, 6000 bp, Homo sapiens
gttttcacctccgtttatctccaggccctggaacagtgctggcacctagcagacactcaagaaatgtttatcaaatgaaatgtacagaggcggaaacagaggctcagggaagtgcattaacttgcctaaagtcacacagctggcaagggaatgtcagagttgagatctgaaccttgttttctccctatctcatgttgacttttctcccccaccccagttcaggtccccgagagaaaaaaatgtatgcatagcagaggagaggccagcgactagataacaggaaaagacagacagaaagaaaggagggtaaagggatcttggaacagggtgtgtgtatgtgagggaagaggggaggtgtcctgggactaaggcctttcctgtggtgtgatggaggagaggtgggggttgtagagagaaaatgtctgtgggagaagttctggagcacagtctcagattggaggccaggatcctgagactgagcaaatggtgccaatgcctttgtgtagcaaaggccctgagggaagaggcttgcacttattagtcacctactaagcagtttacataaatgtctcattaatgacagcctccagcaattctctaaagaaggcattattagaccctttttacagatgaataaacagaggcttagcaaggttattacttgcccaaggttgtacagctcctaaatgatggagctaggagttgcatctgggtttgagtttctgtttctagtgggctgggtcaggagagggggtccctaagagggaatgagaggtccttgggtattagggcagtttgggagggattttgctcagggggacccagggccaagactgtttttctaggggacttgtgggctagagccttaggacccaaagttctagacatgggaggcgtggggagggggcacaggggatggttgtggtcttgtggatccccaaaggactggctctaagcagtgtcccttgctgccagctccccctccttccccagactcttttctcccttgcctttgtggacccatggatacctggctgcccctctgcctctcaggccacactttcccggcatctcctctcttttccatcattgctcagggcctgtgctaggttttcttctactttcactcttccatctccccactgggtgatcacttgagcctacatttaccctcagtactcgaagacccccagtttccaactcaacccctgtcctctttcctgagtcccttaaatttattttacttattgaacagacactgatggagcacttattgtgtgccaggcactgtgctaagcacctgatgaatattaactcattgaatgctaaccacgaccctgtgaggtagatattattagtattcctttttacagatgaggaaattgagacccagagtggttatgtgatttggccaaatagtgggggagtctcagaaacctgtgcggggattgtgtctgtgggtctctgtcatcccaccctgcaggaggtaaacatcattgtgagggtagtgcccatgccagccgtgctcattcttgtgcacctagcacccagtgtattgcccggcacacagtgtgagctcaataaatgtcagaattgtttaattgggtttaatttttccctatatctaagcagcacccctcattattctattctctaccataaaaccctacatgaggatctcctcgagtttctctcagtctgctattatcctctttgttaatttatttgttataatgtaggctccatgaaggtagggagttgggtctggtttttttttttttggagatggagtttcgctcttgttgcccaggctggagtgcaatggcgcgatttcggctcccaggttcaagtgattctcctgcttcagcctcctgagtagccgggattacaggcatgcatgaccacgcctggctaattttgtatttttagtagagacggggtttctccatgttggtcaggctggtctcgaactcctgacctcaggtgatccgcccacctcggcctctcaaagtgctgggattacaggcgtgagccactgtgcctggcgggagttgggtctgttttagttactatcatgcttccagcactttgagtagtaccagatataaaataagttctcaaaaatgtgtatagaatgaatgaatggggattaaataataatattggctaacattaattgggtacctactgggttaaggtatgtatatacacctgtcttacttttgtatcttgtttattgcctgtcccttaccccttcgctggaacagagccagagggccacagcctatgtctgccttgctcaccacatagtcctagagtccagagcagtgccaggtacaaggcaggtgctcagtgatcccagtggatgtagcctcgaggtgggagctgggcaggagctacttgcggggggaggtattggccggttccaccctgccccttcctctcccaggtctgttggtatcccagggtgggagcacacctgaaggggtactcgaactcgacctcgatgctgaggtcactctcggtcttgttggcacaatccacgctcagctggagctccccactgtagctgccgcatgtggcaaaggcgaagatggcgaagaccttgggcagcagggatggggatggccacagtgaacctgtgtgcatgtgggagggaggtgccctcctctggacagatcgggggcccagcacaggcagcagcagatggagcagtccccacccccaccccctaatcagggctcatcgggaccaaggacaagctgattacaagggtatggctgtctcttcctgtttctctctctgtgtctctctctgtctctgcctttccatgctgacctccctcttctctgtttgtctctgttgttctctgtgtatctcactgtgtctctgtttctctcggtatctctgtttctctatgtgtctttgtctttctcagatgtctctttgtctctctgtgtctctgatcctctctgcctctgcctatctgatctgtcgatgtctctttttgtctcttttttctctgtctgtgtaagtgtatgcctgtatgtctgtgtctttctgtttcttggtctgtttgtctctgtctctctgtcctgtctctcactcggtctccggatggttctctctctgtctccctcttgcctctgtgtgttggtttctcttttttctgagtgtctctttctctctgtgtctctctctccctcaccctgttttcctgcctctctccctgcgtctgtttctctttgcatctgttttctgtgtctcctttttctttgtttctgtttgtctcttctctcttatgtctgtatctcttctcatctccatatttcttttttttttctcagtatttccatctctgtctttatcattccctgtccctcattctctctgtcaccttcactgtctctgggtttctctgactttgcatctctcacccagcatctgctacaggctccacctcccccacccctccctcacttcaagagaggaggtaggacgtcacagtctcccacttcacaacgggggtaccctcagccctatgtgacgtcacagctcatctgttttctggcttcagacccctgaaacctcaccctggagcccaattcccccatcccctacaacccccgcactcatccctggctactcgcccctactccacccctgctcttctggaccccatgacctccctctctccctgcactctgccccaacagcccggaccacactcacccattgcagcaccttcacaaagccgaggggctccttgaccacccggaactgacccccagccaccagctgaggagagaaacagtggggaaggggtggggttgttggaggtacagggaggtgagcggcaaggctgcccatcaatgaccccaggggatggagcatgtgacctcggggagagggtgagaaggagaaagtgacaccttggggatggtgtgagccccagggtccaaggactggtgggaaggtctgaagagatggtgagtcagatggcagaggaagtcgggggtgagggagatggggatgaggtcaggactagttaaggagggggagcaggtttgaaacgtaaaggcgagtcggatggggaaggggttcgggtagagaatggggatggagtggggtgcattcgggtgggggggttgtgatggtgaaggtgagtcataacggggcaggagtcggtttggctcaggtgggggaagggtctgcaggggtaaaggtgtgttagacggcggtggcggtagatatttgaggtgatggggatggggaagggttgggactgattgggggtgagtttctgaggtggcaaagacgagagacatggcggagagggtctggactgattaaggtgggggagggctgggacacggcttcagtcgctatgtgttgggggtgaggaggctgggggttttggaaggagtaaaaccggattgtcccctaggtgtgctctgggggaaggggtggtcgcctatgggggtacagtctctgtttgggaggggcgggtgccagccctctcccccatccccgcccccacaccttctgtcgctctatttcctagcttatccgcagcaccccccatcttccttccactctcccctccccttgtcccttgccctcactccagcccccaggcccctattcctcccctcgcggtcgccagtaataaacggggctccgggggcccccgctgcggcagtgaggacggccctcgctgcggcaaagagcgcactccttttctccacctcccccttcctccccttcacctgccgcagacccccatccccagcgccggggaccgggtctccgctgccagaccctggccaccacctcccagagtcggctggcctgagcgacccggcctaggcagccgggcggcggcgggctctgtccacggtgctggagcgcgtacctgattcaccacgtccatgtccgccagcagcagcatcagcaatgcagggggcgggaggctcggctagcaagggcggcgcggggcgcggcgggggcggcgcgcgctcgttggaacagcccaggcggctgcagccccgcccctcgcgccccctccttgcccgccacgcgcctgcgcacagcgggttgtaccacagtctcaccggcagccattccggcccggaggctggagccgtgagagcgtgcgggaatatgcgttgggaaaacacaagtcgagggccggggagaggagacctccctgctcggtcctacagtgtgacaactttgccaggctcttttctgagtttgttaaacatgttcactcatttaatgcttacagaagtcctacgttgtagggactattaggccgtttttacagacgaggaaaataattccccagagagcttaagtgactctcacaaggtcagccagctactagctggcagtgcccagagtccctgcagtttaaacacggttcaaggccttccaggttcctttttcatagtctgcattttaagcacaccctgaaactcctgcccccatctagccatctcccttatttctttcttcctctttgtcaaattaatgcctactcgaactctaccactttacctatttattccttagctctctcttaattggaataaccctccttcctgcgactaaaactaggcccatcaaggtcaacagtgatggctatgatgcaaaatccaaaatacagttggggcttaagatgctcaacttcggccaggcgcagtggctcatgcctgtaatcccagcactttgggaggccgaagtggacagtggatcacttgaagtcaggagtttgagactagcctggccaacatagtgaaaccccatctctattaaaaatacaaaaattagctggctgtggtggcaggcgcctgtaatcccagccacttgggaggctgaggcaggagaattgcttgaacccaggaggcggaggttgcactgaggcgagattgcaccactgcactccagcctgggcaacagagcgagactccatctcaaaaacaaacaagcaaacaa

SEQ ID NO: 12691 - DNA, 6000 bp, Homo sapiens; identical to SEQ ID NO: 3130

SEQ ID NO: 12692 - DNA, 6000 bp, Homo sapiens
aggccaggagttcaagactagcctggccaacatggcaaaagctcgtctctgctaaaaatacaaaaattagctgggtgtggtagtgtgtgcctgtaatcctagctacatgggaagctgaggcaggagaatcacttgaacccgggaggcggaggctgcagtgagccgagattgcaccactgcactccagtctgggtgacaaagtgagactgtgtctcaaaaaaaaaaaaaaaaagaaagaaagaaaagaaaagaaatcaaagccatccagattggaaaggaagaagaaaaacgatttctatttgccaatgacatgatcctaatatgtagataatcctgaggaatctactaaacaaattatacttaataaacaattttagtaaggtcgcaagatataggatcaatgtataaaaatcaattttttttttgagacagagtcctgccctgtcacccaggctggagtgcagcggtgcaatctcagctcactgcaacctctgcctctggggttcatgcgattctcttgcctcagtctcctgagtagctgggattacaggcacacatcaccatgccccgttaattttttttgtatttttagtagagacggggttccactatgttggccaggctggtcttgaactcctaagcacaggtgagccacccgccttggcctcccaaagtgctgggattacaggtgtgagccaacacgctcagccaatcaattgtatttctatacagtagcaatgagaaggctgaaagtaaaattaagaaaacgattccatttatgatagcatcataaagaaaatactcatgaataaacttaaacaaaagtgcaaaacatcatgtaaagaaattaaagacctaaataaatggaaaacgcaccccatgctcatgaacaatactacccaaattgatccacaaatttgatgcaatctctatcaaaatgccaactggcttctttccagaaattaacaacctgatcctgaaattaatatggaaacttgagggacttagaatagacaaaacagtcttgaaaaagacgtacaaagttggaggactctcatttccttacttcaaaacttactacaaagctgcagtaatgaaagcagtgtggcgctggcttaagaacagacatttttctaaagaagatccacaaatggccaacaagcacaagaaaaggtgctcatcatttagctaacaggaagtgcaaatcaaaatcacaatgagataccacttcacacccagcaggacggccataacaaaaacccagaaaataacaactgttggcaaagatatagagaaattggaacccttatatgttgctggtgggaatgtaaactggttccagccactgtggaaaacagttcaatggctacaggcacacactccaaagaattaaaagcaaggactcaaacagatacaagtagaccagtgttcacagcagcgctattcacaacagcccaagggtggaagcaccccaaatgctcatcaactgacgaatggataaatatgttgtatatcacaaaatgaaatattatttggcaataaaaagaaattgactattgatacatggatgaaccttgaaaacattatgattaatgaaagccagacacaaaaggtcagtttctatgaaatgtttagaataaacaaatccatagagacaggaagtagattggtgggtgccaggggctaggaagtttgagggagaaatggggatgtgattgctaaggagtgcagggtttcttttggggtgatgaaaacgttctggaattactggtgtgggctgcacaaccttgtgagtatactaaaaaccactgacttgtacactttgaaagggtaagttgtgcagtaggagaatgatagctcaatacagctgtaattttggaagtgttgtgagtcattggcagaaaatggcttggaacacaaggctaggctagagacttgggggttcctggcctggggatcccaggcctctgtggattgtagatggaaggcgctgcagatgcacatgtgcttctttctgaaaatcaggcccatgaagtgcctcaccctgacaaggtgcggacgaggttactcaggggggacagggagaagtgccccctaaagatgggggagcacccgtgtttaaggaggccgggaggcaggcacggggtcccagaagctgacctgtcttttggaacaaaagctccttctcctctgaagaggctgggacctggtgatgcgtccacccccagaagcgcagtcccctgggacagctcatggcttgcactgctttccgtatctacttttttcagtcctcttgttttcccttagttgtgaaggatggttctcctcgtaaaatcccggctttgattgggccaaggaggaatgtagaaagtgaaagtttgcagccaaactcccacggtttcaaagggagcccagcaggaaagcgcacagagggcgcatgcggcagtggccctcctcctggcgggtctccttggggtgggcaagtcccttccatgaaggagagcttagggcgcagagcagggagggcccacccaagttcacctccctgaaggcaggcccagcccgacctgccgaggccttcccggagggctgtggggagccccaagggctaccggtgtcgtcccatggctcatttcaggcctggggtgcagctcgggtcgctctcccctatccacacgtccccacgaggttggccttaaatgaagtgcgacaccaatccttctccaggaaagtcaaaacggccccggaggaatcgcttggagaaatcgcttgccgtttgatggaatgactcccgaaaaggaagcaggaggatgggatccagagtccccgtcaaccaaccatcccagccctggaatccaacacggattccacaggacgccctctcggtcgcattcctatcccgctagggggctggcaatggccacacaaggtttccaaacagcgggaacaagagacgaggagtggcagccgggaactgagagggaagaaggcggaggacagcgaacgggagaagccgagggccccgcgcacccccggagaagggccggggagagaggaccaggagctccgccagggtggggcaagatttgcgtccccgccctgcccctcggctcccgcaccaggtggccagaggagctcggctcacagcgtgaagtcagtccccggattcctgggaattctcccccgtgcccagcccctccttcccccgcccccgcccccgccccggagttctcgccgatccctgcacgggttcccccacgttctcccaagccaacacccctcctgcaaagcacttgattccttcccagtccagaccaataaacccgggagttgaatccaggccactaaacgcatacctgtctgagccctgtctgctcctgggtgccttgaccttgacctccctccacttagccctaggaggtctcagcccacagcatccgggacatttctctagacagtctgcagggtgcacacagaaagtacacaaatgcggggccgggggagcctccgcgcacacagagacggggcacaggaacgcactcacgtagtcacgccacgcacaggcaagaagccccgttccgggccgcggggctgggctccaggtccgagctccgggccccgcgtctccttccctccccgcggggccctgctggtccacgccccgcaaagcccggccaggcactgccacccgcagagagcccaacccgctgatcccggcggcgcccactcacccgagacgcctaaggcccgggagcccatcgttcgggcagggccaggcgggagtgggtgtcggggtgggcacccagcccccggacggacttggaccgcgcccggggacgcccacgcactcccacgctccaggcccgccgggatctagattcggcgccccccgcacggcgggagcctggctccctcccccgccctgggtcctgcggggagagcgtgtgcggggaactgcgctcgttgctatgcaacctccatcccgcgcccgccgcaccgcgcctcccgggacggaagcgcgccccacccgggccaaccccaacttcccaccccacccgtggctggttcccacggagcgccaacacccaacagccccaggatgggagggtgcggacggctccctaccttgtcctcctcgagccctcccgctctcccacgcccgccgctccgggcctccccactggcccgctcctccccgcggagggccgcgcccccgccgcagcgccggcggccctacctgcagcatcactttgtactgctcctccggtttctggaccacgcacatattacatcccatgttgctggccggcgagaggaggcggagggcgggaacgggaagacgcctttcactgacccgggcgcgggacctcgggtcccgggccggggccaggggccataccctggcgcggggggcgggccgcctagcgggggaggggggcacgcccccgaggtgggggcagcggctcgcccctcaggttaactcttcgctggccgaggccaggcgcgggcatgctccctcgcacccggccaggagaaaaagggcagcgggggatgggcgggcgcgccgggcgttgccaggctacggccccccagggagcgcgggggcgcgccgggccgccaggggccgtcaggggccgtgggccgcgcgcctccccgcccgcggggcccgccgctgccgctgccgcctccggctcctgcccatggccgccagccccgggagcccggccctcgcgctcggcgccgcggcccggcccgcgacaggggggcagcggcgcggcggcggcccccgcccgcggccaggccagcgcccgcgctcccgcctcgcccggccgcgctctcggagctcccggcgcccgctcttcgtccagcagccgctggccgtctccagctcccgcccgggacgacgggcacgcgagcgcgcccacggcggcgggggaggggcgcgggcacggggcgcacgcgcgccgggaggggcggggaggggagcggggccggctgcgggagggagcggcgggggcgctggagccggcgcgggaagccgggggcgggcgctcgacggaagcgggcgggggtcctaggcaccccacgacacccggcgtccggtcctgaggggcgggcaccaggcgcgttgtctgcgcgatgccgctctgggagagaggggtcctgccaggaggagcagtctcctgggtcccccagagagagtccgcgatttcagcccctctccccggtcttggacgcagcagccctcacgcctctgctccttcctcgggcttcgccttaaatgactgcatccctccttcaactcagccattccctgctgtctttgaaacggacacctttgtttaaaacaagaaagaaagagagaaagggaggaaagaaaagaaagagagaaagaaaaaaggatgagcgaagcgtggggagggggtgggtcgtggggagagtggcctcggaggccttgggacccgggcctgcacacagcactggccagcctgggcccgccgcctacctgttcctcagccccagccctcacccggtccccgctttcacagcccttccatctcttcctcttctctcccaccacctccccgtcttcttggacaagcctggagggagaaggcctttgcctggaaagcagcagcgggtggaagtctgcgttcccagaggctgccccggctgcaggagatcacttggagaaattgctacatgcttcatttccaggtttgggcaagtgagggaacccccagccacacggggctgttgaatcggagcccttcctttcctccctggctcctcgttagaagagaaatcaagaatggcgggcctgcccagaatgtggagaagagaggcgagtttcttatccagggcttctcccagaaagcagaacttgagacaagggctggtgtgcaggttgcaacctgccacccaatggctggctagtcttgaggaatggcgtcatattgagggctcagcatcggtctctgcagctggtggatggaagaa

SEQ ID NO: 12693 - DNA, 6000 bp, Homo sapiens; identical to SEQ ID NO: 1375

SEQ ID NO: 12694 - DNA, 6000 bp, Homo sapiens; identical to SEQ ID NO: 1374

SEQ ID NO: 12695 - DNA, 6000 bp, Homo sapiens
gggagactggccccacaaagcagcactggggcaggggaagccctcagggtcttcctcacttgcaggaaggctcatgcagatatggctcccgcctcagccacatgtaagtggatttgggttctcctgagacccagtagctagaagtagggcattgcctctagtggtgaatttggcaagccagattttcttcctgtagccagtggctggaggctcccacaccctccaaagccccaggcagggacaagcacagagatggtagcaatgaatatatgaggtggtgatttgaatgtgggagctgtggaaggaagagatgccaagagggtgaagggaagcccacacttaacagagatgcttttgaaagaaacaaactcagccagggccagaacaagtcccctactccatctgccagactgagagacagcaaccctggtgcaaggagacagcctatttccacagaggaagaaagtaagggagaaaagacttcttgatttcgagacacagaaagacaaagagaggaaagggggtgaggagagaaacagacacacgtgcacacacatacacacacacagatgcatatcttgagttagaggtcatccagatttggggcagaagggaatacaggcatccagactcaccaacacacaggacaggggcaaaccctaaagcccagagagaagcagagaggacagggaggggagacaaaacacccacccttagaaagagaaagccctgcactcaccctccaccttaatccctggtctccctggcttctcttcaaacgtaggaggtcccagtgaggtggtctggctctaaagatagctgccaacaatttcttcccatgtgccacgctgtcatccagaggagccccaagccgtcatgtaagaagctgaggttaggctgggcacagtggctcatgcctgtaatcccagcactttgggagaccgaggcaggtggatgacctacggtcaggagttctaaaccagcctggccaacatggtgaaaccccatctctactaaaaatagaaaaattagctgggcatggggcgggcgcctgtaatcccagctactcgggaggctgaggcaggagaattgcttgaacctcggaggcagaggttgcagtgagccgagatggtgccactgcattccagcctgggtgataagagtgaaactccttcttaaaaaaaaaaaaaaaaaggctgggtacggtggctcacaccgctaatcccagcactttgggaggccgaggcgggcggatcacgaggtcaggagattgagaccatcctggccaacatggtgaaaccctgtctccactaaaaatacaaaaattagccaggtatggtggcgggcacctgtagtcccagctactctggaggctgaggcaggagaatcgcttgaacccgggaggtggagattgcagtgagcagagattgtgccactgcactctagcctgggtgacagagcaaggctccatctcaaaaaaaaaaaaaaaaaaaaagtcaaggctgttctgctggagagaggccatatggaagaggactgaagtgccagacatgtgagtgaagaagccatcttagatacccagcccagttgagccttcagatgactccagtcccagccaccatctaactacaactacctgagacccctagaagagccaccttactgagcccagtcaacccacagggccatgaaagagaagactgaattgtggttttaagccactaagtttttaggtgtttgctacacagcaatatacagccagaacacccagggaaggttgcagcagcccttttaaagcttttgacacccccatcccatatccccttcacaacacaatcaacactagcgagtcagactttcagcccctttaattaggtgctctgagaagaggtcagaatggcaggcagggggtggggaaggcggtgcttcttgagccccacttagcaactggtcactcatcctctggcagctggatcttgctggggtcgaagcagttggattccatgatgggaaggccattggcctctcggtatttcacaagcctctcagcttcgcggcgggaccactctttcatcctggtagtgcaaatagcaggggtagacgtgagggagcctcaactgataccaatccctcatctcagctccccattcccaatggtgcaggaacaaaactcctggcagaatccccttcaacctccatccctgcctctgcctcttacccatcccacgctcttggacaccctgtgcacctgtagtcaggcagataggccacaaaggtgctgccaaggaccaggatgatggagacgccaaagaagaagacaagtcgcatgttccagacgtccaaaacggggtccttgtcataaccatgggagtctgggttctgtggagaaatagaggtcaatgagggcttcctgctgctccacaaagccttattctggccctgcataacttggtctccatgtgcccctctcactaaattcctctgtttccattcttgggatatgtcaagctccttcccactgcagggccactgcacttgctgctctctctgcctggaaagcctttcttccagctctagtcatggctggatctgtctcctcattcaaggttttagattcatcaccacttccttcaggaggcactccctagttaccttgtctttcaaagttgaagcataggaaactgctatttttataggtcacaaatggttgaatactggcaatttcttatagctcaagctaatgaaatagccccctacacccaagtcattctctatccacttatcttgcttaactttgtcttcacatcctctcttccttctgtctctttctagtctatgtttacctaagtagcatactttccccattctctgtatatcatacattctcatgttatattatctattatactactttgtattattgttttctaatattttactgtttattttctgtcttccccactatcatgtaagctctatgagagcatgggctttgtctgatttccacactgctgtatccccagggccctgaactgagcctggcatacagcaggccctcaatacatatttacagaatgaacaagcatcctatatatccaagccccttaaccagaggttagtattgatgaagtacttattatgtgccagtcttttcacatagaaacacctcacaatatctcagtgaggtgaaacatggcaataataaacacattctagtgctgagtacatacttacgaagtgccagctgctgttctgaccatttttactcatttaattacatgaggcaggtggggtgtcctattttttagaaggtgtcctattactgttcccatcttacagacaaagaaactgaggcaccaagggtttatgctaccaagatcacacgggtgggtaaccgtcagtgctgcctgatttcacagcgtctgctattaatacagcacagcagacctggtagccctaaattcaaataccagttccacctccaccatgtattcagttatgtgagctagggcaatccacttaacatctctgtgcctcagtttcctcatctgtaggatgagtataataatagagcccacctcgaaatggggtttgtttcgagtataagatgagctaatgcatgtcaagtgtttagaacacagacggggcccggagcggtggctcatgcctgtaatcccagcaccttgggaggccgaggcgagaggatcgcttgagccaggagttcgagaccagcctgggcaacatagcgagatctcgtccctataaaaaaaaaaaaaagaatgcagacggcaacgagcaagtgccatatcggtgtttagtattatcgttgtactatactgcttctaacgtgttttgagcgctgtccacttgaggtgtgatttctgtctgcaaaataaaaccaatcctgcctctggccctggaacgaagataccgagagacaaaggaggaacacaaggtaggcaaaattcccaagtcttctaggctttcgccggccgcgcagtcctctactgcctaagaacgtcctctacagcgccccatctgccgatcccggactgaccccttcggggttccgtccccactacccccccccccccccccgcctctcaccttctcatacaagttttcgtcctcgggttctgggtcctcttgccacggtgtggtcggttctgggggccgctttcccgccacagcggacggggcgaccacagtcctggagaagctagattcccagcggacgcgggcggccgggagccctcgcgtcgccgctgccgccaaaagacggcgagcgctcaaaccaaacagcccagccgccatgacagatggtgctgcagggtctcaggggcggggaaagaaatgcgactgtgcgcagctgcagtgggtgcgagcgcgacaatcatcgccccgcctccgccacgctatataggtcccagatctgatttggttttccaatgaggcggggcgttgagcaaccctctttgcctccagttgtcgtggcttcgtggggccaaccattttcggccaggctgagaaatttcttattgatgggtctgctcatttcctgcataggaagaaatcggtgacatttgggtggatacagttcccagccaatcgccccgagttccctcgcccactggggaaagaggcagagcttccgctagtctttcatcttcaaaggaaatcaagcttctaaaaagcgggccctgccgaattggctaatagctactccttttctccactaggggagcgttcgcaaggggtgtggggaggtggccagcgcttgccaatcagaggaggccagggctgtcccctagcgggcggtgaccaatcgccggggccggccagagcgcgcttccttagtaggtggatggtggtcggagcgccgactcccttctcgtcgtcgccattttgagctggtgactgtggccggctgggagtaggcggcagtgagtttccctgggagggcagcgcgcttggcgcttctcccctccccccgatctgcctccagtctcggacttggttgttgcgcgctccggctccggctgagctgggagagttggaggaggtggcggcgggcagaggtgatgtctgggagcccttccttgacagcccgggccgagaaggtgagcgtcgacgctggtcgtgggggcggaggtaaggggcccggggcggggacgtagaggaggcgcgagggcggacttcgggtcgggggagatgcgcggaacggaggggttggtgcaatgtctcaacccgggagggtttttttttttttggttttttttttttttttttttttttttggtgtgagcaaaggcgcgtgcgcgactgggacatgggatgggtgcatgcgggttgggggaagggagggacggatgggagtgggctactgtggatcactgtgtcggctacatcgaagtttatcagtggggaagcggttgtctgcgactttgagtttgtgcataggagaggggatgctgctctgtgttactctggtgtttatcggtccatggggaaatattctgtggttctggtctctattcctgggggatcggaggggggatgtgactctggtctttaccctttgagggggggcggtctgtgactctgatccttatccatggggcggggcttgggggacgactgtcttttgattgaccctaacccacttattgggtgggaaggggcatgcagggaatgtgtgtgtgactcattgccccttcttttggggagtttgtatctgtgacactgacgctcatccatggaaaggggacccactgtgtaattgtggtccttactgtgtgttccttctgtgatgtgggcccgtagttatttggggctcgtgtctgtgactggcccttggctgtggtggatgttactgtgtgactctggcccctttgccagagtctcttgaaggtttttgtgctctcagacgccagtgcctctgtgtgattctaactcttgcccacctgggagcaggtaactcgggttccctgtggcttgagg

SEQ ID NO: 12696 - DNA, 6000 bp, Homo sapiens
caggccgggcgcggtggctcacacgcctgtaatcccagcattttgggaggccaaggcgggtggatcacctgacgtcaggagtttgaggctaacctgaccaacatggtgaaaccctgtctctactaaaaaatacaaaaaattaactgggcatggtggtgggcacctgtaatcccagctacttgggaggctgaggcaggagaatggcttgaacccaggaggcagaggttgcagtgagccgagatcacgccactgcactccaacctgggcaacaagagcaaaactccatcccaagaaagaaagagagagagagagagagagagagagagagaaagagaaaagaaagaaagaaaaaaaagtatccagaatgcagcacagaggcacaaaaaaatagaaaacttgaaaaatagaagacatggaaggtagcatgagtaggtctaacaaaaatccaattgtcacaccagagagagaagacagacagaatgaagcagcagcaatatatacatatttttcttcttttttttttaaattgaaatggagtcacactctgttgcctaggcggagtgccgtggcacaatctcggctcacggccgacctctgctgcccgggttcaagcacttctcgtgcctcagcctcccgagtagctgggactacaggcgcgtgccatcacagctagctaattcttttgtatttttagtagagatggggtttcatcatgttggcaagactgttctcgaactctcaacatcaggtgacccacccacctcggcctcccaaagtgctgggattacaggcatgagcactacgaccggccacagcagcaacattttaagagataactccctaagaactttccagaactgaagaaagacacaaattcacaaattcaagaagcccaataaatcctaagcagggaagacagaaataggtccacacctagacacgagattttttttttttttttttttttgaaacagtgtttcgctcttgtcgcccaggctggagtacagtggcgtgatctcggctcactgcaacctctgcctcccgggttcaagcgattctcctgcgtcagcctcccaagtagctggtactacaggcgcccgccaccatgcccagctaatttttgtatttttagtagagacagtgtttcaccatgttggccaggctggtctggaactcctgacctcaaatgattccgcccacctgggcctcccaaagtgctgggattacaagcatgagccaccgccgcggccgacacaagatgttaaaagcagccagaggaaaaaaagctgattacctttaaaaccatgacttttagactgcaggctgccttctcaatagcatcaatgcaatccagaagatagttgactgatatcttcgatacactgagagaataactgtcagagagaaaaaaataggtcacattcaaagaatcagaagtcagaatggcttcagacttcagcaacagcatggggaactagaagacaatgaagtgctggccgggcacggtggctcacacctgtaatctcagcactctgggaagcccaggcaggcggatcacttgaagtcaagagtttgagaccaggctggccaacatgaggaaactctgtctctacttaaaaatacaaaaattagccagcattgtggtgggcgcctgtaatcccagctactcgggaggctgaggcaagagaatcgcttgaacccaagaggttgcagtgagccgaggatcactcccctgtactccagcctgggcgacagagcaagactctgtcccaaaaaaaaaaaaaaaaaaaaaaaaaaaaagacaatgaagtgctgctttcgaaattctgagggaaaaatgatttcccagcctaaaattctacaccccaactgtcaactgtggggttagactaaagacatttttagacatgaaggagttcagtacaccactgacaaatgtaagaattcaacaactgtttaaaaagcaagtcttgccagggcagtggtgtgcacctgtggtcccagctactcaggatgctgaggcaggaggattacttgtgcccagcaagtagaggctgcagtgacctgtgactgtgctactgccctccaacctgggtgacagagtgagaccttgtctcaaaaaaaaaagagcggggggggggggccgggccgggcgtggtggctcacagctgtaatcccagcactttgggaagccaaggcgggtggatcacttgaggtcaggagtttgagaccatcatggtcaacactgcgaaacactgtccctactaaaaatacaaaaattagccgggcatggtggcacacacctgtaatcccagctactggggaggctgaggcaggagaattgcttgagccggggagacggaggttgcagtgagccgagactgcgccactgcactccagcctgactgacaagagtgagattgtctcaaaaaaaaaaaaaaaagtaatcactagaaaagaagctacatatgtacataacatccaaataaccaagaggagaaaaaaatgggacttgattaatcaaaacaaaaacaaaaaagaaagaaagaaagggggagaaaaaaaaacaagggctgggtgtgctggctcatgcctgtaatcccagcactttggaagccaaggtgggtggatctcttgagctcaggaggtcaagaccagcctgggcaacatggcgaaaccccgtctctattaaaaaaaaaattaatacaacaattatcctggagtggtggtgcacacctgtagtcccagctacccaggacgctgagacgggaggatcgcttgatcccggggatgtcgaggctgccatgatcgcaccactgccctccagccagggtggcagactgagaccccatctcaaaaaataaataaataaaagcaaacaagaaaaaaaaaggcttgaaacatatctgatagataaagggctaatcaacacaatatataaagaactgcaaatcagtaaactaagagcaaataacccaatataaagacattaaagggtagccacggacatctcagacgacgaaaaacaaaagacagtaaacgtataataaaacatgtaattgcaaggtgatccgggaatagtaagcgaaaagcaacaattaaatactattttctcatccaccagaacgccaaaaattaaaaagcctaacaatgtccagggctggcgagaatgtggcagaaggtgatgtcacataccctgcaagtgggaatctaaacagattcagggttttggtttttttttaatcgcaattaggtggcctgttaaattttttttcttgagacagagttttgctcttgttgcccaggctggagtgcaatggctcgatcttggctcaccgcaacctcgacctcccaggtacaagcgattctcctgtctcagcctcccaagtagctgggagtacaggtatgtgccactacacccagctaatttttttgtatttagtagaaacggggtgtctccatgttaggctggtcaggaactcctgacctcaggtgatccacccaccttggcctcccaaagtgctgggattacaggagcgtgtgccactgtgcccagccactttttttttttttttagacggagtcttgctctgtcgcccaggctggagtacagtggcgccatctcagctcactgcaacctcgcttcccggattcaagtgattctcctgcctcagattcccattagctgggattacaggtgcccaccaccgcctggcatggtggctcacacctgtaatcccaacactttgggaggccgaggtgggcagatcacctgaggtcaggagttcgagaccaacctggccaacatggtgaaaacccgtctctactaaaaatacaaaaaattagccaggtgtggtggcggatgcctgtaatcccagctattcaggaggctgaggcaggagaatcgcttgaagccaggaggcagaggttgcaacgagctaagttcgagccactgcactccagcttgggcgacagggcgagactccgtctcaaaaaaaaaaaaaatgtaaacacacattccctttaacccagcagaacatgggaacccaagggcattcagcctgtggcgcgaccaggcggcctgacttgagctcacgtagaaattcggcatttttgaaccaagagacagcacttgggatccggaatgtctggacttgggcacggcgctgtggagctggcgccgttgggagccatgcgagttctgggtcggtaggtcacctcagaggtggggagaaggttctctgagaccgacatgggggctagtgctggcaccaccggacatggggcatttcagacacagggcgagcacattccctagttaccagggttcattcgagtcagtcacgtcacaggctggcaatgggctaactcctcctcaacaatcacacggggcttgcctcatagaatgttttaaaaaaggaaaggaggctggcgcaggcgccaaccgtctcagaaccctgagcactgccccacccccaccctgcccgccatagcctgggctgttgtgggggaggggtgaccatttatcacgaaacaaaaaattgcgccacagcagctccctccctcccccacctttacggttgcagctgcacgtcccacgtgcagcaccaccccctgacacgtgcggcaccaccccctgacacgtgcggcaccaccccctgacacgtgcggcaccaccccctgacacgtgcggcaccaccccctgacacgtgcggcaccacacagctagtgccggaactttttgtgcagagaaagaagaccctgcacccgcgcggagggagcccttttgagattgcaggagagaagatgagaatgggactattttcaataactgtgcacatgcaagtcacaaacattccagatcccttgacttgcttgcggagggagcggccggcggagggagcggcaggtggagggagtggcacgaggcatgcggagggagctgcaccgacatcacataaacgcactgggcagctcgcaggcgccattcgctcttcagacgccggagacgtaggagtgggtcttcagactccaaaggggttggactaatggcggatgctgaggcgagggctgagttcccggaggaggccagacctgacaggggcaccttgcaggtgttgcaagatatggccagccgcttgcgaatccattccatcagggccacatgctccacgagctccgggtaagttctcctcattgaagtctgggtcatgcagggccacgggcccggtggcttcaggcctggtggccatgaggccgtgtggtgaagggagagccttcagaggcacaatgggctgtgtcgtaatgccctgtcttgggctgttggggcccggtcgagcaccctagatggcagcgaggcactattcccgccaacccaagggtcggtcggttggttggtcagccgcgggttctggagcccgcccctcaatttacccacggccaaagttctggaggtcgccaagatctccagttgggagacaaaggatccagactggactgaggtggcgggagaatgtcactgggatcagattgggctagctgtggttttcattttagcggggagcagggcttccctggtaagcagttgtactggatcccgagggtgaatgagcgactctaacccaggatgtgaggataaaaagcaattaaaattccagcctgggcaacatggcgaaaccccgtctcttaccaaaaaataaaaataaaaaatgagtcgggcatgggggcgcacacctgcactcccagctattcgggaggcttgcttgtgctgttgggtttgctggtatgcagttgatggtttttgcatcagtttgagggatattggtctctagttgtattgtagtatttggttttggtatcaaagtgtaatgctggcttcataggatgtttcaaagtgttccatcttaaattttttggagtggctgggtgtagtggctgccacctgtaatcccaagcactttgggaggccgaggcagacggatcgtgtgagcctagaaacta

SEQ ID NO: 12697 - DNA, 6000 bp, Homo sapiens
acttcgtacatgtgagtgtggggctggggtgccctgagagagaaaaaggggacccatctgtcagggcagctggggtgccccacccccaccctgggactagggagcagagtagaaaccctctctggagggtcccagggctaactgggagccagccctcccttcgaggtagaccatcggggagggaaccgagaagtagctcccatggtggcagtggcttcctcagtggtactgctgatagctggggtagcctggggccggggtgccatccttagggggcagctggctggggtcctccaggaatgggggcgctggagaagggagacttgggtaaggatgagtggaagaggccaggtggagtatttcccactcccccgaccaccagttactcaccatttcggaactgctgggctgtgtagcgagtgaggaggatgccaacgccctcaatgagggccaacaggatgccccccatcattgctgagcccaccatggccagtgggccacctgggggagttggaggcagagaaacagaggtgagagcaggcagaacagggtggaaggggctggggccagggccaggggtcactcactgcgggcagccagcacagccccggtcaatgctccactggtgatagagttccagggatcctccttgccccgaagccgcaccaggccacagtcaatggtggagaacaggcccccccacactgcgaagctacctgtagtggaaccgaggcctaattagttcctgggaaatcctgagaattcacatctcaggggacttccaaggcctgaatgctttggccaagaacagggagaaaaacccagacacaaaggcagatagcaaacccacacagagtatttcctatctgtccccatcctgtggtagctcccacttcaagccgtctataatcaccatcaacattcccttcatctttatggggagttgacaaatgtttacaagcagatttatcttcatatggcttttaacagagcaactttgagcttcataatcaccacacagagttggaattctgatttgggtttcagtgagaaggaaataggttaggaaacccagttaatatgatagttaaaatgtttactgagggcttactgtgtgccaggacctgttcgaggtgctctgttatttgacttctgcaattttaaattagttaatgttattaaagtgtttagcatagcaaccagcacttagtagtatgtaaattacataaactataaaactaccgatgaaatggttactgttatcaccacccccacggtacaagtgaggttcagagaggttaagccactagcccaaggtcacatggcagggaacagtcaggacctagatttaaactccagaacccactttcttcccctccatattcaattgttgggaaacatcacccccctagaaagtctctggcaggggctagaatctgaacccctaacttgcagcctagacccaaaggatcaaccactcccacctttgccaagacatctcctatatctatctccccaagtccctcacctccaatctggggggctcggatcctcacagcattggcactacctctcaaccggtgccgaattccctggggaaaggaaggaagggcgttagggcagggctgaagccactggcagacacgtttccaacttttaagagagggaagaagatgggagacctgttagaggtatgagctgtagagatgtggagaagtggccaagaactagtggcctggagagcgccccaacatgggtgttctcagagctaggttgagaagtgctaattcattcatacatttgttcattcattcattcagtgaatgattaacaagtacctactatatgtgccaagcaccatgccatatgcagggatacagccatgaacaaggtaggtctgctctctgccctctcagagctcacattaacggtgggagacacagatcttgagcaagagtagataaacaagggagcttcagacagcaatctgcactgtagaggaaatgccatgaagaaatatgactggggctgaggggtcaggaaaggcctcttgaaggagggggaatctgtgctgagaccttgaggatgacaaacttgggcaaagatccagggaggagagttccaggagtctaggggagggacggggctacatatataaattgcagagaccttggctaatagatggcatttaaagtcatggcatttgcgatcttctgggaggggaggtggtcagagaaaaagaattatgttaaaagaattctctcaacttcaaggctgtcttccgtctgccaattaaattcctgtcattttcctctatccgggtttctgagccagaatctgcctctaggtaaaatgcgcagtggctaacacctgtaatcccagcactttgggaggctgaggtgggtggatcacttgagttcaggaattagagaccagcctaagcaacacgttgaaaccccgtctctacaaataaataaatacatacataaataattagccgggcatggtggcgcagtcctgtggtcccagctacttgggaggctgaggtgggaggatcacttgagcctgggaggcggaggctgtagtgacccatgatcaggccactgcacgccagcctgggcaacagggcaagatgctgtctcaaaaaaaaaaaaaaaaaaaaaaacatggccaggcacagtggcacacgcctgtaatcccagcactttgggaggccgaggtaggtggatcacctgaggtccagagttcaaggccagcctggccaacatagtgaaaccccatttctactaaaattacaaaaattcgtcaggtctggtggcacatgcctgtagtcccagctacttgggaggctgagacaggagaattgcctgaacccaggaggcagaggttgcagtgagccaagagcgtgccactgcactctagcctgggcaacagagcaagactgtctcaaaaaaaaaaaaaactgtctggctttgcacatacatttaaaatttggtgatgactctttgaacgacacagcatttccacagaggagctccagttgggtggggtggagggtggaagacagaggccatgtttgcaatccctacaaaatcccagatacaggagccaggctcggcacatagtaggtgagtgggcaccagaatgaataagtgcacgtgactggcagctccaagcagttttcagagcagcctcccttgtgggcaagatagctaaccccacaccaacccagggaaggcctggactcacaacaggggcattgcggaaacccttgatggcctggaagactccgccaccgatgacacccatagtgaaggctccaccgcaatcatccacaattcgccatgggctgcaagcaggaagggaaggacggggttaatgtgagccctcccccaggtcctgtcacacgaactcttttctaactgggagaaaccaagtcaccagaatgggaagttcctaagtaggaacaaacacttcagataataatgagctagttctgtcacgctttttccacacacccccccattaaagcgagaaatggggcaaagggggagaaatattagtcttcgccctgtctaccaaccaaggaatcagccaacggttttactgtgatcaaagattaaatgaattggcacacgcagagttgacgtttcaataagcgacataggcgtgttaactagccaagacagactgtcagcaaagcaggaccgcgtcgcaccccttctccgacggtgagcccgtccaaccatgccccgccccttttcaatccggcacaactgggaaaaaccaagagcgaccgcgggaagcatccaccgtccccgccggccctcaacaggttcatccgtgccccgccccccactgacaaaggcgacctgggaaaaaccactggcggcaactctggggatttccggtcaacaccgtaccacccctagccgggatggatcgtccagcgtgtcttttttcgttaacagggctaggagattacgaagtcaggagaaacatggcgtggttcggccttcgccgcaccttctctggttgtggcccctcataacggagcccgaatgacaggaaccgagtgggggtagcgggagatacgttaagagtcccccgagtctggtacatggctctgtgcggccgatgcctcccccgcccgacccccacggctggccttggcgtcgcagcaatattccggatgcctgtgcccattgccgtaccagggctcccgagcgtactcctccatggcgctggcgtctggccgcgcagtcaggccacgcccccagcgtagacgcacaccggcgtcggagctttccgcctattaccgggcagcgattgggtcgctataccgcatgtcacgccaaggacgcactctcattggccaatcgagtttctgccatttgttcattgcctcctgagcgtagtccagttactttcaggctcggggagtgaaggcctcgttgagagaaggtctcattcggtgttttgggaagagagtcgtgtgggcccaggtatcgtagcggcgacacgagagagacgggcggtgtgacagccttccactacctgcacgagtgtattggtaacgttggggtgggtgcactcttttggagctggaggaagtgctgccctctgctcccccatcccagcgctttggtttctcccacccggcagtcatggggacgctggatgagcccatttctgaagtgcggaggggccgggcttcttaggctgtgggcggagcctgggcctgggagaggaacagggccctggagcacctggtttcggggacagtagggttggtgggagttgcgatgatattgccacctacctcttacatcttttagtgcgtatgttctgtccacccagctactggttcatttgagtagatcggagtcagatgagtacatgtttacgggaggcgcttggttacgggatccagataggaatctttatctgagctgcttgtcagtttgttcgtctgtccctaggtctgtctgctatcagctatgccgctgcccgttgcgctgcagacccgcttggccaagagaggcatcctcaaacatctggagcctggtgagacagctaaaagcagatggtcctaacacgtgccagcctcgacaggcacttttgttgttgatactgacgcttgatacctagcatgggccaactgtgcaccaagcaatggggtggcaggcatttttcgttgttaacaatgtggattcctgacatccatccctaccgcgtgtcaagtggagggggttgggggaatagatatttcattctttttttttttttttttttttttttttttttttgaggcagagtcttattgtgcacccaggctggagtgcagtggcgcgatctcggctcactaaaacctccgccttccaggttcaagcgattctcctgccttaacttcccgagtagttgggactacaggcacgccccgccccaccacacctggcaatttttttttttttttttttgagacagagtctcggtctgtcgcccaggctggagtgctgtggcgtgatctcgtctcactgcaacctccgcctcccgggctcaagcgattttcctgtctcagcctcccaagtagctgggattacaggcacgtgataccacacccggctgatttttgcatttttagtagagacgggtttcaccatgttggctaggctggcctctaactcctgacctcaggtgatccaccccccacccttggctttccaaagggttgggattacaggcataagccactgtgcccggcagatatttcattcttaacaatactgactggctgggcgtggcggctcaagctggcattcccagcactttaggaggctgaggcgggtagattgcttgagtttagggattaagagattagcctgagcaacatggcaaaaccccgtctttacaaaaaatacaaaaattaatcgtgtgttgtggtgcatgcctgtagtcccagctacttgggaggctgaggtgagaggatctcttgagcct

SEQ ID NO: 12698 - DNA, 6000 bp, Homo sapiens; identical to SEQ ID NO: 1373

SEQ ID NO: 12699 - DNA, 6000 bp, Homo sapiens
taagcaagtggttgacattttttccccatcatctgtgatgacattttcttggttcgagtatattctttcctattggacacagaatctccagcctcaacagagataaatgccagccaacccagctccctggcacccccacctggtcctgcaagaacagctgactggccatctgcacgatctggtccacgtggatgatgcccccgatgctggtcatctccgtgtccgagagcagcgtcagcaccatgatggcttccaccagcagctgccggtactcgggctgcggcacgcggttcagcaccgattcgacatggacagcaaacttgatctcatgcggggtcatctaccaaagggacaggcaggcaaccaccagtgagaggacagatgcagccctatcaatcaatcaccgagtaaccaagggtgaccgtagcagtgcctgggctcggggctcagcgccactgctgccccttttctggccactccctggatcctgctggcagtggccctcagagcaggaggctggagtatgcctccaggagccagcctgtcctcgcctgatttatctacccttccccccatcgactacagcttccagggagcagggaccatttctggtttctctttcctcttcattattccttccagcatgaagcatggtgctttgggtggggtaaaactaaaaaaaaatccatgttaaaaagaatgacaaatcacctagggacgattactgtttttagttggagaaaagggccgagaaggctgcccatggggcaggccagggtggcatggagattggctcctttctttcaccagggttctaaggggtgtctggcaaatgcaaagagcttgctagcccagaaatgctgagtctcaggtgaagaaaaaggctgatgccaataaatgctggaaagacatttttgccaaatatgagggtgaaggggctagacagctcagagctacaaatggcctgtcaattagaatgagcccaaaaggagcacaagaggtcagagtccatgcaatgaagcccttattgtgaacccacagaggggcccgcctctgcgtttttctcatcgtacctctcgggtcgtcgaggatgggaggacataaccatcgatggagagaccgtggcactggaggcagaatagagcgcatttcagtcagattccagaatgggataagcacatgcatgcacacacaggcgtgcatgcacacacagcaccctctgccctggaaacccatatgagggctgggacacgccagactgtcagagttatttttagagagcttgttctcactgcccacaggctgtgttttcgatggaacaattctagggaacccagcaggcatctttcagatctcccccgaacaatgccctagggggctgccgagtcctcccgggaggctccgcattgtacttggcaactgggcccgggcggctgcgaggcccctttggtgccataataaagggggattttcatggctcctgctggggaagggatgcttctgtgcctttgcaggcatctatttttgagatttctataataagcaccaatcacaaaagcctccagcacatgcacagacatgcacatgcacacccatgtatataaatatcgagtgccagctcaacacaaaatgctttttcataatagaaatatcttggtattgcgccagtgagtccgagcggaagcatgtgatgccccaggaagagtggggaaattttctaggaacagcttgttctagtctaactggccaccttctaaatcccagcaccccggcctggagcgtccccagtgggctgagggcagaacagcagtggacactcccacccccttaagagaggcgggaagtggagcaagcaccatgagcccctgcaggatcctgcctgggtcccaggagtccagctgctcgggcagggcctgctccgacctcctcacatccctctgcggtggccgtgaggaataccttggggcccatgaagcacaggggcccctgttacagaaagaaccttgagcaagtggtgccatggctttgggaagggggctgttgtatgctgtcactgggattattttttctcttctctcccactgtgaaatgaactaaaaaatagttctggggggaaaaaaatgtcttggtttgcacagcttttaagcgaggcacactgtccttccattcaagggaaaagacagggagggcctggtgcagcccagggagctgcataaactctctcgggctgatgcagaagggagacactgggggggtacagagaatgctgcccccctccttgacaacaggcgctcagggaggtgctcctgtgctcaggtacaggcaccacagttcccagggacaacagctggggagacgtgaacggccccaggcagatgggaagcgcaacagccggctggctgaggggagtggggccccagggtgtgagggagattgtgccttcagggcacacaggacctggggctaaactggaagctctccacctctgtacaccttgggactgaacacggcaggtaccctgggagggtggggctcagtcacatcgctgaacagcagggacactactcctgcctggatgtgcgggaggctggggggctggcctactccaggcccctcctgaactgtcattccaggttccaggcctgtaggtgctgctctgggtggttttacagggttttcatctgaagcctcccagcctttccctgttcttctatgttcctaaaatacgtccaagttggtcccacacaaccacaacctagactgccaccttgtcttacttgctgtggttctcaactgggttgatctgcctcccacgggatgtttgataatgcctggagacacttttagttgtcacacgggggtggggtggggagaagagatggctgctggcatctggcgggtagaggccagggatgctgtagacatcctaccacgcacaggccccctagcagagaatgcctcggccccaggtgccaacagcgctgaggcagagaagccatcctcagggctgtgtgtttgctcgcctggaggtgccaccatgccttgccaggacagtaaggggacggttcacttccccaggagctcgcgtctcggcttaccttctggaggatcttccacaccctctggtagaatcccacggggaccctgttgatggccccatccagccttctcctgcgcagccactggccctgccgctcaccccagccgatgtgatgtcctcccgagtctgaggatgacgtgccagtgggcgaggatggggtgctggacctctgcaagacagacagcttggggcctcagaagccacgcagcaggtgccccagggaaagtgcgccatctcgaagggcggccctgcgacctaggcacaaatgccagaacaccactcgccagagaggaacacggttcctccagtccaccttgtctgtttcctcatgtgagatgactcgcatactttgggttgatcacttcattccatgttgcactctgccctgccccccgagaggcagtcccacccccaaagctagaacccataaggaggaggccgaacagggcgagcacgggcttgggggtcagactgccggagtgctaatccccactcaatgccagcggtgccaaggacacacccgaggccgtctggccctgccatgaacactgattctgggcctcagtctcatctgcacagtggggacacagtcaggcatcctataaagagctgcccggaagccttcaccacgtggagacacagaagcccctgaggcatacctagtgtgcgctaagtgcccatgaggggcagctgtcacccgcacgtggcgcctgtgccactgcagtgggagagctttgagggtgacaacgggccctcggagcaggcatccatggctcagggagacaaactccatagtgcccacttcattgctgcagtgccacagagaagtgacagacacgtttccacaggacaggaaccacagagaaggcaatacatgacacgggggaagacaaacagtgaagcccgcgtttagtggcgaggacctcgcagatcagggtccatccacccaccctttgcaatcccatttccggctttccctattcttggcactgggctttatcttaatttggggcaatggctgcctctgaactggggctgactttgctgaagtgagggaagagggcgccatctccttcccacctcaacattggctggactgattcaggctccagagggggacactgtctgagaggctccccaccgctggcggggcgggcctctgtgagtgggggcgcatcccctccctgcggcaaagctcccagccttctgtcttgccctgcggggcttctagcttcgagacctccaggtcgagaagggataaccttcactctcacacatctctttgcctgggactatctggcacttttgtttctcgatagtgccacacatcaaatgtgcacagtcaaatgtaaagggttaaagtgaaatcctgaagtgtgctagcagggcaggaggtggagctctcctttctgcagcagttggatttcaacagatcttattttgaaaaggcagttcggctgggttattccattgggctcattactgccacttaaggcaacaattagacacaaataaaagtaattacagctgcactcctcaatgactcagctgatccgggccctccagtttcaggaggaagattcagcctctgctctgcggtgagctcaatccgagccctgcacgagatctggggcatggcaggtgcagagtgctagttggcacatgtgggcaagggctcaccatcctggctccataaagaggcatggaactaatgccccgaagtttccagaagctctgggaattggtgagaaggaaactcctcacccacactgtgccaaggagcacaggcagagaactgagagcttaagacggagaacaaagctcagggcaagcactttggggccttctttctaccctcctcagaattccagttggaggagcctgtgagcatcccgctgaaaacacttcagccctgctcgaatcctcagaagttgggcatgaggtgggagcatgaggaaggacgcgaggaggagcggggacggacacaataatcccgaggcactgttaccgcagacttggaggaatgcgcactgctggacgcggcctggcccacagaaaagaactacaaaacaaaaagaatccactcagttgacagcaatgacaccaagagacacagcagagaggagggtcatggagcagcatccgaaacacccacagaaagcagcagcagagaatgcgggcgcagagaaggtgccacagcaacgcacataggcaagctcaggtgcaggggcacctgcaagcaccgctctgggcttcgactccacgtgaaacttactaactgctctttttaaaaacatgaactgttaccattgaatgtaaacattaaatgttcctgtcatatgtggagggtgcatcatcaagttaggacactatttattttccaaactcacagccatgaaatgctcacattttatggtaagaattgtgaaaatctacagatgaaccaaatacctacagctgacactaacatgctgcacctaacattcagtagatattcattaaatgaatgaatatgatgatcgggctgatacctttggccacataagtatttcctcgtctaaaatctagaatgtacccttaatttgcaagggtacagtgtgctatctacaaggtattcttacaaaagagactagagattgaaaataccataacacctattacatttttggaacaaataatatgttccttgacgtaagtggtcaaagtttgtactagctaggtgactctaagcccagcaaagaacagaggtgatcacttcatccccgtaacacgcaagaacagcatgaaatagaggcggaaggaaccactcagattcacccacggtcaggccatcgggatgcggggacagagggacggtgccaccgagtggctggcaagggaagatgtttgaaaaggcagtt

SEQ ID NO: 12700 - DNA, 6000 bp, Homo sapiens; identical to SEQ ID NO: 12392

SEQ ID NO: 12701 - DNA, 6000 bp, Homo sapiens; identical to SEQ ID NO: 12424

SEQ ID NO: 12702 - DNA, 6000 bp, Homo sapiens; identical to SEQ ID NO: 1382

SEQ ID NO: 12703 - DNA, 6000 bp, Homo sapiens
ggcacacgcctgtaatcccagctacttaggaggttgaggcagtagaatcacttgaacctggaaggtagaggttgcaattctgtgatgatgagaaatgttgagatatttatgtatagtgtgtgtgtgtgtgtgtgtgtgtatatatacacagccacacacacacacatacacacacacctgttagctgtgtatatacattctttgggaaacagaagatacttatttttaattgggttattattttcttgttcttttgaatctgtttttagttccttgtacattttgattaaccccttgtctgatatacagttggcaaatatttgctctcattacattagtctggtgatttattttattttatttttattttttgctgtaaggaatttttctagtatgatgtaaccttatttttctgtttgtgcattttttttgcttgtgtttttgaagtcttatccaaaaatattcttgcccagaccaaggtcattaaatatattttgtgatttattctactagtttgacagattgctgttgtcattacatctttaattttaaatgtttttaagtatgtattcttataggtgaggtctcacaatattacctagtgtagagtgcagtggcataagtgtttcacgctatagctttgaacagctaggctcaggtgatcctcccttctgggacccctgagtagctaaaattataggggcacatcactgtaccgggctttttaatccatttgagttaatttttgtattcagtgagagatagggttgtaattaggtccttctgcatgtagctctcttgttttcccagcaccacttattgaagagactgacatttcctcatttggttttcttgccacctctgcagaatatcagttggctatacaggtgtagatttatttttgctcactgtgttctgttgtattggtttatagcattgtggcatgcccagttctgtggattcaatccctaaccccattgacatcttcaggatggctttggctattcatggttttatttttgtggtttcatatttatttaggatttttttcaatttctgtgaaaaatgccattggtgttttgatagagactgcactcaacttgtgcacttctttggatcatataaacattttaaccatattactttttccaatcaatgaacataaatatctttccactcatttatgtcattttaacattttattagtgtttcatagatttcagaatgcagattttttaaatctccttggttaaatttattcccttttatcccccatacctattgtgaatgagattgtgttcttaatctttgttgttgttgttgttttttttggtattttgctgttagtgtatggaaatgctatccaattttatatgttgattttgtaaactgaaactttactgaccttctgtattagttctaactactttttagttgtgtgtttaaggatttccatagtttgtcattagcatgtatggacaattttatttcttcctctctaatttgggtagcttttcttactttctcttgtctaatttttccggctaaggacttttattattacattaatagaagtagtgaaaatgaacatcttggtcttccttcagatcttcacagaaaagctttcaacttttaattccctttgagtgtgatattagctaagggcttgtatatgtggtgttatctggttattcgggtctgtgtcttttgttgtgttgagttacggttgttccacgcataatttgttaagagattttattgtgaaactgttgaattttgtcaaaacttttttcacttattgaaatgactgcatagattttgttctttattttgttgatataatgtatgacatttaatgattctagtgtattaaaccattcctgcatccctataatctcacttgatcacggtgaatgattttctaaatgggcattataagtcattttcccagtattttattgaggatttttacattatgtttatcagatattttggcccatagttctctcttttttcttgtatccttgtctggttttgtaatcagaataatgccatcccaatggaatgagttggaacagttcccatatcttcctttttgtgttatgttttgactaggttaaaaaaaattggcagcagtttattttttgtggtaggtagaatgcaagagtgaatacatcaggtcctgggcttttctttaataggtgatcttttattgctgatttgatttcttaccattaatttgtttctgggtatcagttatggtatctcttttatggctctgatttcctttatcaggggctttgttttcttttgttgttttttgtttttgttttttgtttttacttttgagtttagatttatgtttttctaattccttcattgaaacatcaagttgtatatctgatatcttctcatagttgaaggcatttattgtcataacttccctcttaaaactgctttggttgaatctcataggttttggtgtgttgtgtttctatttttgtctcaagaaatatggtgttttctctttaatgtcctcactgactcattggttattcaggagcatgttgtttaattttgatgtacttatgaattagtgatttcagaagagatactttatgtgagtttgatctttccaaattcattaagatgtgattttttacctaatgtatgacatatcctgaaagatatctcatgtatgcagtggagaagaatgtttattctatagctcttggatggatagttcagtaactgtttttagcattttcactacatggcattttcatccaatgtttacttgttaaattctgtctgcattatctattcattgctgaaagtaaggtgctgaatttttctaatattatcttgcatttttttcttcctttggatctattaacatttgtattatatatatgcatatattatttgtatggatgtattcccgttataatatgttattttttttctgctgcttaattctgtatcctctctttgtttctgatgtttggtggtttgattatattaagtcacagggatatgtttattgaaattgaatgtgattgtaagccttcaagattcctatagcagaatatttatattttatttaagtttgaaaaggcttctgttattatttatccaaataagctttctactcttttcttacactttttttttttgagatggaggtttgctcttgtctcgcaggttggagtgcaatggtgtgattgtggctcactgcagcatccacttcctggtttccagtgattctcctgagttccagtgattctcctgactcaggtttctgagtagctgggatcgcagatgtccaccaatacacccggctaatttttgtattataatagataaaccatttcaccatattgtccgggctactctcaagctcctgacaacatatgatccacccgccttggccccgcaaagtgctgaagatacaggcatgggccatcacacccggctctaccacactcttgaatgccagtgtctgacacattggctctttggatgttatcccattaatctcatgaatcttatttatgttttctcctctaactgtatattttgaattgacctccctttgagttttgctgcttgaccacttctattgtcactgctgtcaattgcattttttattttgttgtgttttattcttcaagatttctgtttgttttttcctcccgtattttaatctcttctgtaagcttctctgataaatttcagaattctttgtgttttgctgaagtccactgcattgtcttcaaacaagtattttgaattccttgtcaggccttgtgtccatgcccatctcttttgggtcagtcaccaccagcactttattttgaccacttgatgccgtcatgtttctctcattgatcctaatgcttgtgactatgcatcaatgtctgtgcagtgatgtaggtgcctaatgcagtgtttgtagtttgcctttgtttggaagctttcttccacagtaaggctgtccggagattcagggcaaggaggaggaaattaaggtattttagcctatgatagcttcagccctggtagcacgaggggaaacattaatgagcagactttcatggctggagtaatttgactgacaaagtcgactcagtgccaggttgcacctgtatcacacagttgagcactggatgcactcaaggcctgtaacttccatggtctgccctctgatctttattcagtgtctgaggttactgtagtcaatcagtgggaatattgacgggaactcagctccattctgcggagatcatagtttctaatctgttgccggggttggtctacatgattacccctgggtatcaacctcccaaagtgctggggcaaggggacaggcaaataaatgtcccaaggcaaaatgtactatgcctacctccttcgcccaagtgagcatcccacctccacctcctgaatagttgagactacaggaatgtgccaccatgcctggataacatttttggtgttttcttgttgttattgttgggctcaagtgatctactcacctcagcctgctaaagtgctagggttacaggtatgagtcactacacccagctaaaatttactttctaaaatttaacttttagatcatttctttttattcagtcttatttctcataaatgcagttaagaatgttattgctttagagtttctctttgggtatccctgaaggaataaatggactctcgatattcattttctaaatggtgttagaaaatgaatagttactttagatgagtaaagactatttggcctctttttgttttctggcttcatttcattgtgtatgaagactgtattattttaacccttctgtatatgtgaaatgaatttttactctttcaactgaatgtagtagaagattgtttaaactgattatacagctactacataattttgtttttcttccttgtgcatattagtctaattattgggataacaatgtcaaaattaaattaattttcgtattaaaaacttctgataaaattacctaagtacacacaaacaaaaacatgcccacacaaatcacttaatttctaaaacttttaatttttctgcttctctagtaccttgtattccatcacacagcaaaatctggcagctccacttccagaatttacttgaactccacagcttatttccgatttcctgttatcaccagagtctaaaacacagtttatattgcattcacctcctattttacaccgtaatttcctactttacactctaactttatataaaaaagaaactaccttttcaagatctaattcacgcaattttatttgttcttaattgagacttctttctaggtgctgtcacaccttgtaacgtcagatacaaatgtctctatccaatttcatgagttccagttattttattttaagggaatgtgtatatacatttataaatttgtgtatgtgtgtattcacttattctttattttatatgttttgcatgcatatattcactaaatccctgataatggaaagataacaaatctttttttttctttcttttttgtatgtaaattattttccgaaggaggtgggttgggagaaatatatcttaacttggcaagtttaaaagagaaagtggccattactaatgaaaattattctctagcattttcatgtttatctttaatagcattgctgatgacatattccctcttatcagttgtgtaggtgccattcactgcaatatactggccatccgcactggcaacgactttgctgccattaagctacaggtgataaaattgatctatctcatgatatggcattcgttggtgattatctcacctgtagtgactctggcattcttccctgcatctctgaaacaggggagcttacactttctattaatcatatattttgtattattgttgacaccatggctggagttttcgaaaagtggaactcatcttcctagcaacacaaaaaataattccagcatggtgggtaagt

SEQ ID NO: 12704 - DNA, 6000 bp, Homo sapiens
atctcctatgggctttaacaccagtaacaatggagtgttccaaggagaggcacatctttctattatcccaaatttaaagagccggactatatgctttgtaatcccatgggtggcttttactgggatggaatactgacgaatttgcactgggtaagtgtctcgcagcagttccaccactacgggggcctgatttatggctagctctgggagactgtcctccacccagacccctgccaggttgagaaacaattccttatacattgcctcattttcctgctggcaaaatgcatctttacaaattttgcacctctcatagagtctccattcctctgttgtggggatggtaagggtcattatcatgtcttctttgacctaggtttagagtcatttccccttctcaagtaaaggagatttgtgcttgcaatttctggagcaattatcttcctaacagaggaccagacaatttggcaaatataaaaaatcatgttggacttgctgtcctccaatcacacatcttttagatttgaagtaaggcctctttctattattcctgtagctccaattatattgaaataatttttagacagtgaaccaattgcttgagttactactgagtgctctgcaccagtatcaaccataaagtccattttctggccccctacctccattgagaccataggctcctccgggcctaatgaaatggagcctggtctatctcagtcctcataataatcattgattcctgccagtccaattaaatccatgtctgacttctgaaccccttgaccagtggcggtgggttctggccagccgttttttccctgattgttgcctctttccttttctctttctgggcattcgttcttacagtgtcccatctgcgtgcatcttgaacattgatctctctcaagcttaggttggcacccttgtcctggcttagcttcttggttttgcctagcttgtcctctactctgaccatgaccatgtcttctcacaaaacccgtttcttgtccaactaaggctgtctccagccagtctgccttttccttagctctgcatttagctttgctcctggcctcctcatcctgatttacaaacaccttagtagccaccaggacaggataagctgggtaatattcatgccttcaaaacattctaacttctgaagtttaccctttatgtctccttgttcctggcttacaaatgccacattaaccatacactaattacccgcagcctctgggtcaaatggaccgtccaggtcatgagcctgtttggtttatcaggccatgagcctattttgtgtatccccagttgtgtcacttaagactgtgtccgtggtgtgagccaggttaagtaaacttagagacctgagagcccatcttgaagagctgaggaagcagccaagaaactttatcaattctgttggattatcagagcacctaatatggtcagagaattaaaatttgtaagagtcatgtaataatagtgctgcagatcctgtaatgccaggtacagtttctgcttcatagctgtctggaggcgcagttttcagaaaccatagacatctgagaaatatgtttctggcttttatgctcaagcaaatttattaaagaccacaaggccacagcaatattcaataaatcatgacatgctttatttcatgtcatatttcaaaagcttcatgtagcagtaaacaataccacttacatttaattagttttattgaacataaagcaacttcatttgtaatgaaccacatgttaggattaaggatgtattttaatgacctttaagtaatgcgaccaagttgttgccctcgacctcacagcagaggctttcctatattattgaaaacttcagaatgatttttaagttaccatgaaaagcttcaaatgacattctccttattgtgtctttattcagtcatctgatgttgactatactagatgaaatgcattcctgtaaatgctgatgtgtgtatagaaatgagcttcttgccaacctgttcttaattttaatgtatcaaaagtagtttgatgtatgaaaatttcatgttttgaaaattaccatgacaatgtaatatttacattctcaaactcaccctattcctggaatcatctgagtacatatcagacattctactagaagtttcataattatcaggttattagagaatatttctttttgtgtaaactagcttgtgttgaaaatgaatttcgctgttaatagttaatacacagtttgagctacagtaacacttgcagtgcggtaaattagtatggtcaaccattagtccaccctttctgaagctgctcttctttagaaaagctgaggcaggtggattgcttgaggtcaggatttccagaccagcctgggcaacatggtgaaaccccatttctactaaaagtacaaaaattagccaggcatggtgctacacccctgtaatcccagctactcaggaggccgaggcacaagaatcacttgaactccagaggagaaggttgcagtgactcgagatcccgctactgcactccagcctgggtgaagaatgagactccatctcaaaaaaaaaaaaaaaaaaacagaaagagagagagaaaaagctgacctgcggatatctttcacagtctctttaaagccatgtgaatttgctttaacattgaacgtactttcacagagcttgtaaggtggtagtgaggaggaagtatctttttgcttgtgtgttttctgtgggcaggtatgcttggggaggtctaagctcctgctgctgctctctagcttcagggcttggatgggaggcactgtgtgcatggtgttctccaaaccatgtgtgtcagatgtgatccttgtcctgggtcttctaaggaccaatattttggagagtaattttggatcttcagtcatgaactttatcttttcctctgattttagaaacatctcattctgtgtttgaagtcactttctgctacatggtctaagatggcatctgtttcctgtactgaaatgtgactgatacaccttaaattgaaagagtttttcaccctcaccaatagaccaggttggtggtacaagggcagctttgtcatccctcatatgtaagtttgcaggctgggtcccagtaactgccccacctccacagtggcccacaggggaggggaagcaagggcccagtaagtaattggacccaaaggaacacatgtcccttcttatcttctgctggccataatcagtcacctgatcctaaacagctgcaaagaaggtttaggagttcattctttaggtgggaagccacccacccatctaaagctccaaatttgtatttttcataggaaatgagaagaaacgtggatggtctctgctgagccattgcttcattttcgttgagtgtctgattcacccgtgcttctgctgagtggagtgcactaaaccatttggggagttctcagaggattgtgctgccctgagaacaggatgccccttagaattgctgttaaaattactagttttattagcatcaattattattactattttttcagatggagtctcactctgtcactaggctggagtgcagtggcatgatcttaactcactgcaacctccacttcccaggttcaatgattctcctgcctcagcctcccaaatagctgggactacaggcgtgcaccaccatgcccagttaatttttgtatttttagtagggacagggtttcaccatgttggccaggatggtcttgatctcttcacctggtgatatgccggcctcagcctcccaaagtgctgggattacaggcataagctaccatgccctgacttgcatcaattatttcacatgcattcttgaacgagctctaagcagtttacaaacctttatgttaatgactcacatacattaaaatagaaaataaatgaaatatcaacagaaaaatagtatgtcttctagaaatgaaagaagacttatcagttttagatgactgactcttctgtttacagatttttaaaaaatattttaagttctggggtagatgtgcagaacgtgcatgtttgttacataggtattcatgtgccgtggtggtttgctgcactcatcaacccgtcatctacattaggtatttttcctaatgctatccctcccctacccccgcacccccaaacagtgcctggtgtgtgatgttctcctccgtgtgtctatgtgttctcattgttcaactcccacttatgagtgagaacatgaggtgtttggttttccgttcttgccttagtttgctgagaatgatggtttccagtgtcgtctatgtccctgcaaaggacatgaactcatcctttttttatggctgcatagaattctgtgttgcgggtgggggcttcagggccgcggagggggtccccttagggtgggccgtctcctcctcgcccgccgcaggcaggagcgcgggggaccgaaaccgtgtagtttgcagcgtcaggcagcgggtccgcgcccagcgagcggctccccagctcctgggaggatgcggacccgggacgcccccgtgagctcactgcgcctggctgacacgaggcgctcacagaacaaagcaagggcttcggggagggcgcggccgcggggccgagcgcgcagatcgctccggaccgggacaccgcctgcgaggagcgccgaccagccgggaagggttcgcgctaggcggcgcccgggtcccgtcggccagggtctcgccggctcgccgcgctccccaccttgcctgcgcccgcccggagccagcggttctccaagcacccagcatcctgctagacgcgccgcgcaccgacgtaggggacatgggcagagcaatggtggccaggcttgggctggggctgctgctgctggcactgctcctacccacgcagatttattccagtgaaacaacaactggaacttcaagtaactcctcccagagtacttccaacactgggttggccccaaatccaactaatgccaccaccaaggcggctggtggtgccctgcagtcaacagccagtctcttcgtggtctcactctctcttctgcatctctactcttaagagactcaggccaagaaacgtcttctaaacttccccatcttctaaacccaatccaaatggcgtctggaagtccaatgtggcaaggaaaaacaggtcttcatcgaatctactaattccacaccttttattgacacagaaaatgttgagaatcccaaatttgattgatttgaagaacatgtgagaggtttgactagatgatggatgccaatattaaatctgctggagtttcatgtacaagatgaaggagaggcaacatccaaaatagttaagacatgatttccttgaatgtggcttgagaaatatggacacttaatactaccttgaaaataagaatagaaataaaggatgtgattgtggaatggagattcagttttcatttggttcattaattctataaggccataaaacaggtaatataaaaagcttccatgattctatttatatgtacatgagaaggaacttccaggtgttactgtaattcctcaacgtattgtttcggcagcacttatttaatgccgatatactctagatgaagttttacattgttgagctattgctgttctcttgggaactgaactcactttcctcctgaggctttggatttgacattgcgtttgaccttttatgtagtaattgacatgtgccagggcaatgatgaatgagaatctacccccagatccaagcagcctgagcaactcttgattatccatattgagtcaaatggtaggcatttcctatcacctatttccattcaacaagagcactacattcatttagctaaacggattccaaagagtagaattgcattgaccgcgactaatttcaaaatgctttttattattattattttttagacagtctcactttgtcgcccaggctggagtgcagtggtgtgatctcagatcagtgtaccatttgcctcccgggctcaagcga

SEQ ID NO: 12705 - DNA, 6000 bp, Homo sapiens; identical to SEQ ID NO: 12483

SEQ ID NO: 12706 - DNA, 6000 bp, Homo sapiens; identical to SEQ ID NO: 12484

SEQ ID NO: 12707 - DNA, 6000 bp, Homo sapiens
ctggggtacagtggcatgatcatggctcactgcagcctcaacctctctggctcaagtggcccaaccttcagcctcttgaatagctggtaccacaagcatgcactaccactcttattttaattttttggtagaaacaggatctcactacattgcccagggtgatatcgaactcctgggctctagtgttccccctgcctcagcctcccaaagtgcagagattccaggcatgatccactgctcctggccttttttttttttttaagaaattaattaattaattttaaaaagtcttagtgaagtaattcagacagaagtgacttgtctgctctctcccaggtcacatgtctcagggaagagatctgctacccaaccaatgcacccacaaactaagccaagcattcagattttgcccaaaatctccctcccaatctcactttatcatgctgccttaaagtatttagagttgatgtctccccacagcaatctccactcccttcccttcccctctcccctcccctcatctcccctgccctccactcccctccacttcttttctgtcccttctttttctccttttctctttctctctctgtctctctcattcaggacttgatttgtcacagccattcttgcaacaaccttacaaacattttctttgctttccacattggccctcttcaactagttctccatgttgccatcacagtgattgtcctaaaacataaatctgattatttcttcttccctcactgcagaaaatgtgttattggctttcccactgcctactggataaattccaccttttcagcatgacatttaaaactcttcacaattaggtctctaatcctttcctcactaccttcttttcaaattcaatgtcctgccatgccaaaccctccctatttctagatctccacacatacagtattgctgcgatgtctttagccatggcttctttttcaacttcttcaaccaatcagtgtcgatgtaccattccttccctactctgaatgttcttcctttgcaaacccttggttaattattttaacctctatgggtccctattaatttatatgtattccttgtacacaccttcctgtaatcacatttttttctcatgcttttcattatcttgtctactataatgtatgctttctcaaaaataaatggataagtctcactcacagttacatgtctgtgcttaggactgtgtcagtgctaaaaaaaaaaaaacctgaacttatgaataagtcaatgaattaatacattcttggcaaagtccatgactttgtggcctattataaattagtgtgttcaagttgaggttctggtttagtttaggacatagatatctatatatagtccatatatctacatatatatgtctacatccatgtatatcactgatttgggggataagctgtatttataaacaatactatcatgttaatgggtcttcaatatctacacaataatggaaaaaagtatatgtatatttctaaatatctaatgggaacacacacacatatatgtatgtatgtatatacatttttctattattggctatagatatcttttaatagataagtgtatatctatgtaccaatcttgttggcaaaggatgctttcatgcatattatctcatttagtccccacaaggaaaagcaacccacaggaaaggtaataataatgtcagctcaacagagtcacagaacataactgactttatgacaaggcaaaatttgtgaggatagagtcttaacatgaaaccaggtccccagattcatgtccatcatcttccccattattgctcatgttgtccaaaatccttcgcatcatcatggaaggcttcatgcttaggtttacttcctaaagcagaagcaattaggagaatgtcctatgtgttgtggacattatcttttttccttccataaatgaattaatgggcaatgaaataattttaagaaaagctaacttttatagccaggtagaataaaagtaatcaccatgaaatattgtgaagataagcaggccccacacactagctcagctaatcaatatgacaatattacatggagattatctgttccattttacagatgcagaaatggaggcgaatattaaaattcattcctaaggtcacatgcaacttaaacccaagcaatctcattttagaatctgtgttcattgccacaacattctatgatgtactctgatctttgcattgccaatttaaatccaactttcttgaagccaactttaaatactgggaactttaagcattgtcaatttcaagccaactttctccaacccaattttaaatacaggggtcacaccctcctcctcgccccctgcaacttgaaactccctgggaaagataacctcctggacctgggaaatgaggagtatttagaaacaactgcctcttggtaagcacacctcctatattttatccaaatcatgaaattataacaatagaagtaaacaaaaagccttcattcatcctctttcaaccataacctcggcataaaaagctcctgtactttacagagctgtattccaattttcgctgctcttaaaattttttttaatatcattgcttcccaattgactcacaataacgcagacatagggactgctggagactgtgaccttaaacagttaaagatgtctgcatatacgacatcatgtttggtgtggagagtacctagagattcctaaaaaagcaaagaggaagaaggtttgctgtgcgcatctgggtaccctgctctatctccagggttcccaggatctctctgttacagctggtttgcactgggattagttgctctttgcatgaggttgtagctgtggacgtgggttttgtagcgattgggacgactctggagatctattggctgctgggtttgtaaatttcattcattttggtccaatggcagaaggagagcgccggaagcagaaggacctctctcccctagctctctttttcttgcagagacatctttctcccatctctgtctgttagtacagagctcttattcagccactagctcggcctttcctgcttcaattgtaatgcttgttctgcccggggacacactattgacagcagaaacaatgaatttcctccaaacccggcaatgttggtggctcttgcattcctctggatgagcgaatctagttggggggttcccgaaggggaaggcgcctgggctttcaatacatcctcctgaatcatactgcgtttcaggttccttagaaaaatttggatgtgtaaaaagaactcttaacggcgatgcaggtcttccacagctaaggtaggtgcagttttaagacgtgtctttcgcatattattatccttattttaaaaagccgtttaaacaatttgacttgcagtggctctccagcaaaggagggaaagcctcactggcgatatttgagcttcatttcatctaatatttatttattttttccttttattattattattattggacaatttgggctggactctctcccatctgtctcgctccatttctttggtgtggatgggaatgtggacatcgatgtatggcttttacatgcaatctctccacaggaacatttggttttattttcacttaaaaataaaaatgcagaccaccaatgttgtttggaagcattttgctgcaatcagctgtttgaacagctctggggccatgtgcggtgtgtttaaaaagtagcgctgccttccatacaaattaaaggaagactgtggcggggaaaggaggggaaaaatatatatatatatacacacagacatatatatgcgtatgtgtgagtttgtgagtgtacacatacacacacacatatatatatgtacacacacacacatacatgcagtacaggggaaaaggagggaaaaggccagggctggagatggcgaaagcaggaggacttctgcaaactgtgagcatggaaggcttttcttctcttttctccccactccaaagccctcgtcttctttaagaaaaccaccactgcctggggtgcttcttttgggaggctggggttgggggttggtgccattaaccagagagaaaaggggaaataaagcttggttggggttgcattatgagatttttttttcccttccttcatctcctggcctcggataagataaggcttgggggatgcacgaaataatccaagtgattgattagacctggcatggcttggttgggctggagaaagatcggggcgcgctggaaaccccgcgtgaagatgaaatgactgtagctccgtgctgctcctccaaactcgggagcggtatccatgcacccctttcccgtgtgtgtgggttacgacgtgggtgggagtggtgaggcaagccgcaaaagtggggtagagctggtggttttgcttcttcggaagcctttgagtgtggcctggaccttagatgggggtgcagggcggtttgccgctgccaccctcggcaccatctctgaactgcccgcttttccggaggagcggaaaagttggaagccgaaaagacaggcgcccggagccctggtctaggtatcaggtgatccggagccctagtcggtgcccactaagaacaccccttctcccatcgggggttcggaggagtgttaagcctgcgggtctgccagtccctaaggtagggatgggggaggggtctgaggaatccgttccaataggcacaccatccccacagccctagaaaaggcaaccaccacccgctccttcctcccgcaccatcccatctcaaggctctctgctgacccgggccgatttcatctggtctcttctcccccgcttcccacctcccaattcccgcgcagctcggctccgttccctcccactcccctaggcggaactgaaagcgaagatcagccaagagcacagtcggaggcggcagagacggtggcgggtgagctaggggctgtgagacgaagcagggagagagtgaacttcagccccgtcccctccccactgccacggctggggcaacccaacccgcgcctgaagcggcttggcttgacctgcggaagcgcgggccgggatggcgtggggagagggaggtaggtgccactgggctgcagatgacgagtgggttgggggcttgctgtgggacaagaggttcaggttccggcctgcgccttccactccgcggtggcgctctctgcctgcggttttccaggaggccgatctaccccagggacactctcatccttcaggcggtctcctggacgccctttcctccccttgcctcccagcctgacctggctctttcgcccctcggagaaccggtaggttggggtccctcggcgggggtctagtgagccgagtcgcgagctttgcgcccccggtatctaggccccgtgccgcgcgcaaatccgggcccaggcgtacagttctggagcctagtcgccgccagacacagggccctttgtacccggaggagcgggagcgggagcgggggcgtcagggcaacccttgcaccccagaggcctgcctaggaccaccctgggaacaaatgtctcgctcggaaaacgaggtgaacccggaggatgtcctacgcatcatacccctccccttcttgagaaggctttttctttttttctttttttttcccggtttccttttctctggcttcttccacaccttaccgcaggtgtgggcctcttttcatgtatgtgcggctgctatctcggggatgcaggggaaggcggtgtaggaggcagcgtggaagggtactaggaggtggcggcgggattttgggcctggtgatgtgcccgagcttgcagctagctggggcactgggcccccaagtcacgaattcagcccagggcttgggcgagactgcccggagcaaggacggaggatccagatttaccatttggacccaaattaagaaatttggggtgggggttgggtaggggttttgaaactaagcaggtgacgtccttgcgagctgaatccacaaggtggtagtat

SEQ ID NO: 12708 - DNA, 6000 bp, Homo sapiens
tggcacacgcctgtaatcccagctacttaggaggttgaggcagtagaatcacttgaacctggaaggtagaggttgcaattctgtgatgatgagaaatgttgagatatttatgtatagtgtgtgtgtgtgtgtgtgtgtgtatatatacacagccacacacacacacatacacacacacctgttagctgtgtatatacattctttgggaaacagaagatacttatttttaattgggttattattttcttgttcttttgaatctgtttttagttccttgtacattttgattaaccccttgtctgatatacagttggcaaatatttgctctcattacattagtctggtgatttattttattttatttttattttttgctgtaaggaatttttctagtatgatgtaaccttatttttctgtttgtgcattttttttgcttgtgtttttgaagtcttatccaaaaatattcttgcccagaccaaggtcattaaatatattttgtgatttattctactagtttgacagattgctgttgtcattacatctttaattttaaatgtttttaagtatgtattcttataggtgaggtctcacaatattacctagtgtagagtgcagtggcataagtgtttcacgctatagctttgaacagctaggctcaggtgatcctcccttctgggacccctgagtagctaaaattataggggcacatcactgtaccgggctttttaatccatttgagttaatttttgtattcagtgagagatagggttgtaattaggtccttctgcatgtagctctcttgttttcccagcaccacttattgaagagactgacatttcctcatttggttttcttgccacctctgcagaatatcagttggctatacaggtgtagatttatttttgctcactgtgttctgttgtattggtttatagcattgtggcatgcccagttctgtggattcaatccctaaccccattgacatcttcaggatggctttggctattcatggttttatttttgtggtttcatatttatttaggatttttttcaatttctgtgaaaaatgccattggtgttttgatagagactgcactcaacttgtgcacttctttggatcatataaacattttaaccatattactttttccaatcaatgaacataaatatctttccactcatttatgtcattttaacattttattagtgtttcatagatttcagaatgcagattttttaaatctccttggttaaatttattcccttttatcccccatacctattgtgaatgagattgtgttcttaatctttgttgttgttgttgttttttttggtattttgctgttagtgtatggaaatgctatccaattttatatgttgattttgtaaactgaaactttactgaccttctgtattagttctaactactttttagttgtgtgtttaaggatttccatagtttgtcattagcatgtatggacaattttatttcttcctctctaatttgggtagcttttcttactttctcttgtctaatttttccggctaaggacttttattattacattaatagaagtagtgaaaatgaacatcttggtcttccttcagatcttcacagaaaagctttcaacttttaattccctttgagtgtgatattagctaagggcttgtatatgtggtgttatctggttattcgggtctgtgtcttttgttgtgttgagttacggttgttccacgcataatttgttaagagattttattgtgaaactgttgaattttgtcaaaacttttttcacttattgaaatgactgcatagattttgttctttattttgttgatataatgtatgacatttaatgattctagtgtattaaaccattcctgcatccctataatctcacttgatcacggtgaatgattttctaaatgggcattataagtcattttcccagtattttattgaggatttttacattatgtttatcagatattttggcccatagttctctcttttttcttgtatccttgtctggttttgtatcagaataatgccatcccaatggaatgagttggaacagttcccatatcttcctttttgtgttatgttttgactaggttaaaaaaaattggcagcagtttattttttgtggtaggtagaatgcaagagtgaatacatcaggtcctgggcttttctttaataggtgatcttttattgctgatttgatttcttaccattaatttgtttctgggtatcagttatggtatctcttttatggctctgatttcctttatcaggggctttgttttcttttgttgttttttgtttttgttttttgtttttacttttgagtttagatttatgtttttctaattccttcattgaaacatcaagttgtatatctgatatcttctcatagttgaaggcatttattgtcataacttccctcttaaaactgctttggttgaatctcataggttttggtgtgttgtgtttctatttttgtctcaagaaatatggtgttttctctttaatgtcctcactgactcattggttattcaggagcatgttgtttaattttgatgtacttatgaattagtgatttcagaagagatactttatgtgagtttgatctttccaaattcattaagatgtgattttttacctaatgtatgacatatcctgaaagatatctcatgtatgcagtggagaagaatgtttattctatagctcttggatggatagttcagtaactgtttttagcattttcactacatggcattttcatccaatgtttacttgttaaattctgtctgcattatctattcattgctgaaagtaaggtgctgaatttttctaatattatcttgcatttttttcttcctttggatctattaacatttgtattatatatatgcatatattatttgtatggatgtattcccgttataatatgttattttttttctgctgcttaattctgtatcctctctttgtttctgatgtttggtggtttgattatattaagtcacagggatatgtttattgaaattgaatgtgattgtaagccttcaagattcctatagcagaatatttatattttatttaagtttgaaaaggcttctgttattatttatccaaataagctttctactcttttcttacactttttttttttgagatggaggtttgctcttgtctcgcaggttggagtgcaatggtgtgattgtggctcactgcagcatccacttcctggtttccagtgattctcctgagttccagtgattctcctgactcaggtttctgagtagctgggatcgcagatgtccaccaatacacccggctaatttttgtattataatagataaaccatttcaccatattgtccgggctactctcaagctcctgacaacatatgatccacccgccttggccccgcaaagtgctgaagatacaggcatgggccatcacacccggctctaccacactcttgaatgccagtgtctgacacattggctctttggatgttatcccattaatctcatgaatcttatttatgttttctcctctaactgtatattttgaattgacctccctttgagttttgctgcttgaccacttctattgtcactgctgtcaattgcattttttattttgttgtgttttattcttcaagatttctgtttgttttttcctcccgtattttaatctcttctgtaagcttctctgataaatttcagaattctttgtgttttgctgaagtccactgcattgtcttcaaacaagtattttgaattccttgtcaggccttgtgtccatgcccatctcttttgggtcagtcaccaccagcactttattttgaccacttgatgccgtcatgtttctctcattgatcctaatgcttgtgactatgcatcaatgtctgtgcagtgatgtaggtgcctaatgcagtgtttgtagtttgcctttgtttggaagctttcttccacagtaaggctgtccggagattcagggcaaggaggaggaaattaaggtattttagcctatgatagcttcagccctggtagcacgaggggaaacattaatgagcagactttcatggctggagtaatttgactgacaaagtcgactcagtgccaggttgcacctgtatcacacagttgagcactggatgcactcaaggcctgtaacttccatggtctgccctctgatctttattcagtgtctgaggttactgtagtcaatcagtgggaatattgacgggaactcagctccattctgcggagatcatagtttctaatctgttgccggggttggtctacatgattacccctgggtatcaacctcccaaagtgctggggcaaggggacaggcaaataaatgtcccaaggcaaaatgtactatgcctacctccttcgcccaagtgagcatcccacctccacctcctgaatagttgagactacaggaatgtgccaccatgcctggataacatttttggtgttttcttgttgttattgttgggctcaagtgatctactcacctcagcctgctaaagtgctagggttacaggtatgagtcactacacccagctaaaatttactttctaaaatttaacttttagatcatttctttttattcagtcttatttctcataaatgcagttaagaatgttattgctttagagtttctctttgggtatccctgaaggaataaatggactctcgatattcattttctaaatggtgttagaaaatgaatagttactttagatgagtaaagactatttggcctctttttgttttctggcttcatttcattgtgtatgaagactgtattattttaacccttctgtatatgtgaaatgaatttttactctttcaactgaatgtagtagaagattgtttaaactgattatacagctactacataattttgtttttcttccttgtgcatattagtctaattattgggataacaatgtcaaaattaaattaattttcgtattaaaaacttctgataaaattacctaagtacacacaaacaaaaacatgcccacacaaatcacttaatttctaaaacttttaatttttctgcttctctagtaccttgtattccatcacacagcaaaatctggcagctccacttccagaatttacttgaactccacagcttatttccgatttcctgttatcaccagagtctaaaacacagtttatattgcattcacctcctattttacaccgtaatttcctactttacactctaactttatataaaaaagaaactaccttttcaagatctaattcacgcaattttatttgttcttaattgagacttctttctaggtgctgtcacaccttgtaacgtcagatacaaatgtctctatccaatttcatgagttccagttattttattttaagggaatgtgtatatacatttataaatttgtgtatgtgtgtattcacttattctttattttatatgttttgcatgcatatattcactaaatccctgataatggaaagataacaaatctttttttttctttcttttttgtatgtaaattattttccgaaggaggtgggttgggagaaatatatcttaacttggcaagtttaaaagagaaagtggccattactaatgaaaattattctctagcattttcatgtttatctttaatagcattgctgatgacatattccctcttatcagttgtgtaggtgccattcactgcaatatactggccatccgcactggcaacgactttgctgccattaagctacaggtgataaaattgatctatctcatgatatggcattcgttggtgattatctcacctgtagtgactctggcattcttccctgcatctctgaaacaggggagcttacactttctattaatcatatattttgtattattgttgacaccatggctggagttttcgaaaagtggaactcatcttcctagcaacacaaaaaataattccagcatggtgggtaagt

SEQ ID NO: 12709 - DNA, 6000 bp, Homo sapiens; identical to SEQ ID NO: 12545

SEQ ID NO: 12710 - DNA, 6000 bp, Homo sapiens; identical to SEQ ID NO: 12546

SEQ ID NO: 12711 - DNA, 6000 bp, Homo sapiens
tcagagaattaaaatttgtaagagtcatgtaataatagtgctgcagatcctgtaatgccaggtacagtttctgcttcatagctgtctggaggcgcagttttcagaaaccatagacatctgagaaatatgtttctggcttttatgctcaagcaaatttattaaagaccacaaggccacagcaatattcaataaatcatgacatgctttatttcatgtcatatttcaaaagcttcatgtagcagtaaacaataccacttacatttaattagttttattgaacataaagcaacttcatttgtaatgaaccacatgttaggattaaggatgtattttaatgacctttaagtaatgcgaccaagttgttgccctcgacctcacagcagaggctttcctatattattgaaaacttcagaatgatttttaagttaccatgaaaagcttcaaatgacattctccttattgtgtctttattcagtcatctgatgttgactatactagatgaaatgcattcctgtaaatgctgatgtgtgtatagaaatgagcttcttgccaacctgttcttaattttaatgtatcaaaagtagtttgatgtatgaaaatttcatgttttgaaaattaccatgacaatgtaatatttacattctcaaactcaccctattcctggaatcatctgagtacatatcagacattctactagaagtttcataattatcaggttattagagaatatttctttttgtgtaaactagcttgtgttgaaaatgaatttcgctgttaatagttaatacacagtttgagctacagtaacacttgcagtgcggtaaattagtatggtcaaccattagtccaccctttctgaagctgctcttctttagaaaagctgaggcaggtggattgcttgaggtcaggatttccagaccagcctgggcaacatggtgaaaccccatttctactaaaagtacaaaaattagccaggcatggtgctacacccctgtaatcccagctactcaggaggccgaggcacaagaatcacttgaactccagaggagaaggttgcagtgactcgagatcccgctactgcactccagcctgggtgaagaatgagactccatctcaaaaaaaaaaaaaaaaaaacagaaagagagagagaaaaagctgacctgcggatatctttcacagtctctttaaagccatgtgaatttgctttaacattgaacgtactttcacagagcttgtaaggtggtagtgaggaggaagtatctttttgcttgtgtgttttctgtgggcaggtatgcttggggaggtctaagctcctgctgctgctctctagcttcagggcttggatgggaggcactgtgtgcatggtgttctccaaaccatgtgtgtcagatgtgatccttgtcctgggtcttctaaggaccaatattttggagagtaattttggatcttcagtcatgaactttatcttttcctctgattttagaaacatctcattctgtgtttgaagtcactttctgctacatggtctaagatggcatctgtttcctgtactgaaatgtgactgatacaccttaaattgaaagagtttttcaccctcaccaatagaccaggttggtggtacaagggcagctttgtcatccctcatatgtaagtttgcaggctgggtcccagtaactgccccacctccacagtggcccacaggggaggggaagcaagggcccagtaagtaattggacccaaaggaacacatgtcccttcttatcttctgctggccataatcagtcacctgatcctaaacagctgcaaagaaggtttaggagttcattctttaggtgggaagccacccacccatctaaagctccaaatttgtatttttcataggaaatgagaagaaacgtggatggtctctgctgagccattgcttcattttcgttgagtgtctgattcacccgtgcttctgctgagtggagtgcactaaaccatttggggagttctcagaggattgtgctgccctgagaacaggatgccccttagaattgctgttaaaattactagttttattagcatcaattattattactattttttcagatggagtctcactctgtcactaggctggagtgcagtggcatgatcttaactcactgcaacctccacttcccaggttcaatgattctcctgcctcagcctcccaaatagctgggactacaggcgtgcaccaccatgcccagttaatttttgtatttttagtagggacagggtttcaccatgttggccaggatggtcttgatctcttcacctggtgatatgccggcctcagcctcccaaagtgctgggattacaggcataagctaccatgccctgacttgcatcaattatttcacatgcattcttgaacgagctctaagcagtttacaaacctttatgttaatgactcacatacattaaaatagaaaataaatgaaatatcaacagaaaaatagtatgtcttctagaaatgaaagaagacttatcagttttagatgactgactcttctgtttacagatttttaaaaaatattttaagttctggggtagatgtgcagaacgtgcatgtttgttacataggtattcatgtgccgtggtggtttgctgcactcatcaacccgtcatctacattaggtatttttcctaatgctatccctcccctacccccgcacccccaaacagtgcctggtgtgtgatgttctcctccgtgtgtctatgtgttctcattgttcaactcccacttatgagtgagaacatgaggtgtttggttttccgttcttgccttagtttgctgagaatgatggtttccagtgtcgtctatgtccctgcaaaggacatgaactcatcctttttttatggctgcatagaattctgtgttgcgggtgggggcttcagggccgcggagggggtccccttagggtgggccgtctcctcctcgcccgccgcaggcaggagcgcgggggaccgaaaccgtgtagtttgcagcgtcaggcagcgggtccgcgcccagcgagcggctccccagctcctgggaggatgcggacccgggacgcccccgtgagctcactgcgcctggctgacacgaggcgctcacagaacaaagcaagggcttcggggagggcgcggccgcggggccgagcgcgcagatcgctccggaccgggacaccgcctgcgaggagcgccgaccagccgggaagggttcgcgctaggcggcgcccgggtcccgtcggccagggtctcgccggctcgccgcgctccccaccttgcctgcgcccgcccggagccagcggttctccaagcacccagcatcctgctagacgcgccgcgcaccgacgtaggggacatgggcagagcaatggtggccaggcttgggctggggctgctgctgctggcactgctcctacccacgcagatttattccagtgaaacaacaactggaacttcaagtaactcctcccagagtacttccaacactgggttggccccaaatccaactaatgccaccaccaaggcggctggtggtgccctgcagtcaacagccagtctcttcgtggtctcactctctcttctgcatctctactcttaagagactcaggccaagaaacgtcttctaaacttccccatcttctaaacccaatccaaatggcgtctggaagtccaatgtggcaaggaaaaacaggtcttcatcgaatctactaattccacaccttttattgacacagaaaatgttgagaatcccaaatttgattgatttgaagaacatgtgagaggtttgactagatgatggatgccaatattaaatctgctggagtttcatgtacaagatgaaggagaggcaacatccaaaatagttaagacatgatttccttgaatgtggcttgagaaatatggacacttaatactaccttgaaaataagaatagaaataaaggatgtgattgtggaatggagattcagttttcatttggttcattaattctataaggccataaaacaggtaatataaaaagcttccatgattctatttatatgtacatgagaaggaacttccaggtgttactgtaattcctcaacgtattgtttcggcagcacttatttaatgccgatatactctagatgaagttttacattgttgagctattgctgttctcttgggaactgaactcactttcctcctgaggctttggatttgacattgcgtttgaccttttatgtagtaattgacatgtgccagggcaatgatgaatgagaatctacccccagatccaagcagcctgagcaactcttgattatccatattgagtcaaatggtaggcatttcctatcacctatttccattcaacaagagcactacattcatttagctaaacggattccaaagagtagaattgcattgaccgcgactaatttcaaaatgctttttattattattattttttagacagtctcactttgtcgcccaggctggagtgcagtggtgtgatctcagatcagtgtaccatttgcctcccgggctcaagcgattctcctgcctcagcctcccaagtagctgggattacaggcacctgccaccatgcccggctaatttttgtaattttagtagagacagggtttcaccatgttgcccaggctggtttcgaactcctgacctcaggtgatccacctgcctcggcctcccaaagtgctgggattacaggcttgagcccccgcgcccagccatcaaaatgctttttatttctgcatatgttgaatactttttacaattaaaaaaaaagatctgttttgaaggcaaaattgcaaatcttgaaattaagaaggcaaaaatgtaaaggagtcaaaactacaaatcaagtatttgggaagtgaagactggaagctaatttgcattaaattcacaaacttttatactctttctgtatatacttttttttctttaaaaaacaactatggatcagaatagccacatttggaatactttttgttatcagtcaatatttttagatagttagaacctggtcctaagcctaaaagtgggcttgattctgcagtaaatcttttacaactgcctcgaaacacagaaacctttttaaaaatagacactccccgaagtcttttgttcgcatggtcacacactgatgcttagatgttccagtaatctaatatggccacagtagtcttgatgaccaaagtcctttttttccatctttacaaaactacatgagaacaaacagatcgaaccgttttgaagctactgtgtgtgtgaatgaacactcttttgctttattccagaatgctgtacatctattttggattgtatattgtgtttgtgtatttacgctttgattcatagtaacttcttatggaattgatttgcattgaacacaaactgtaaataaaaagaaatggctgaaagaaaaaaaaaaaaaagaattctgtgttgcatatgtcccaaatttactttatccagtatatcattgatgggcatttgggttggttccaagtctttgctattgtgaacagtgctgcaataaatatacatgtgcacgtgtctttatagtagaatgatttatattcctttgggtatatacccagtaatgggattgctgggtcaaatggtatttctagttgtggatccttgaggaatcgtcacactgtcttccacaatgattgaactaattcacactcccaccaacagtgtaaaagcattcctatttctccacatcatgtccagcatctgttgttctctttttcatgatcgccattctaactggcataagatggtatctcattatggttttgatttcatttctctaatgaccagtgatgatgagctttttttcatatgtttgttggccacataaatatcttcttttgtgaagtgtctgttcatatctttcgcccactttctgatggggttgttttttccttgtaaatctgtttaagttctttgtggattctggatattagccctttg

SEQ ID NO: 12712 - DNA, 6000 bp, Homo sapiens
gttctgtgaacctttttctcatcatcccaataggatgcttgttatgccttctgtatgctttggagatggcatatatcacacattgagttgcattttaataattgaagagtttaatttattcccttattagattttaagcatcttttatgctatacatatttatctttccaataatgattaataacatagtatatattattattgcactaacaattatcctactgaaaatatttgtttcaatttgaccattgtattaggagagtcaataggaatcagtagtgccctatagtgtatctggcttcaccagtattgtatttcgagttccacatattgatcccataggagcattaacataatagtatgtatgaatgtatgtatgttcataatagtatgaacataacagtatgtagaatgtagttgatgaagacactgagatggaaaatcagagagaacaagtaatgtggtatagattatgtctcatgtttcatccagttctttgtaccaaacccagcttatatatccttctaggaaccctactgttttatttcattttatgaatcctcctagctcccacatctcaccatactccacaattagatttcaagtggaaacatgaagaatgatatccttatctcttccaggaattcagaatttaaacctccgaagctcttctgtctgtatcgtaatcctgtggctcagttgttaagaactggtgttttaggttctatcctggtcacttatgagggattttggattagggaaaattataaactcataatatcttatattcactttttcttataagcatgattccatttgtctaagatgctttcttaattttttttttttttgagggagggtttcattctgcaacacaggctggggtacagtggcatgatcatggctcactgcagcctcaacctctctggctcaagtggcccaaccttcagcctcttgaatagctggtaccacaagcatgcactaccactcttattttaattttttggtagaaacaggatctcactacattgcccagggtgatatcgaactcctgggctctagtgttccccctgcctcagcctcccaaagtgcagagattccaggcatgatccactgctcctggccttttttttttttttaagaaattaattaattaattttaaaaagtcttagtgaagtaattcagacagaagtgacttgtctgctctctcccaggtcacatgtctcagggaagagatctgctacccaaccaatgcacccacaaactaagccaagcattcagattttgcccaaaatctccctcccaatctcactttatcatgctgccttaaagtatttagagttgatgtctccccacagcaatctccactcccttcccttcccctctcccctcccctcatctcccctgccctccactcccctccacttcttttctgtcccttctttttctccttttctctttctctctctgtctctctcattcaggacttgatttgtcacagccattcttgcaacaaccttacaaacattttctttgctttccacattggccctcttcaactagttctccatgttgccatcacagtgattgtcctaaaacataaatctgattatttcttcttccctcactgcagaaaatgtgttattggctttcccactgcctactggataaattccaccttttcagcatgacatttaaaactcttcacaattaggtctctaatcctttcctcactaccttcttttcaaattcaatgtcctgccatgccaaaccctccctatttctagatctccacacatacagtattgctgcgatgtctttagccatggcttctttttcaacttcttcaaccaatcagtgtcgatgtaccattccttccctactctgaatgttcttcctttgcaaacccttggttaattattttaacctctatgggtccctattaatttatatgtattccttgtacacaccttcctgtaatcacatttttttctcatgcttttcattatcttgtctactataatgtatgctttctcaaaaataaatggataagtctcactcacagttacatgtctgtgcttaggactgtgtcagtgctaaaaaaaaaaaaacctgaacttatgaataagtcaatgaattaatacattcttggcaaagtccatgactttgtggcctattataaattagtgtgttcaagttgaggttctggtttagtttaggacatagatatctatatatagtccatatatctacatatatatgtctacatccatgtatatcactgatttgggggataagctgtatttataaacaatactatcatgttaatgggtcttcaatatctacacaataatggaaaaaagtatatgtatatttctaaatatctaatgggaacacacacacatatatgtatgtatgtatatacatttttctattattggctatagatatcttttaatagataagtgtatatctatgtaccaatcttgttggcaaaggatgctttcatgcatattatctcatttagtccccacaaggaaaagcaacccacaggaaaggtaataataatgtcagctcaacagagtcacagaacataactgactttatgacaaggcaaaatttgtgaggatagagtcttaacatgaaaccaggtccccagattcatgtccatcatcttccccattattgctcatgttgtccaaaatccttcgcatcatcatggaaggcttcatgcttaggtttacttcctaaagcagaagcaattaggagaatgtcctatgtgttgtggacattatcttttttccttccataaatgaattaatgggcaatgaaataattttaagaaaagctaacttttatagccaggtagaataaaagtaatcaccatgaaatattgtgaagataagcaggccccacacactagctcagctaatcaatatgacaatattacatggagattatctgttccattttacagatgcagaaatggaggcgaatattaaaattcattcctaaggtcacatgcaacttaaacccaagcaatctcattttagaatctgtgttcattgccacaacattctatgatgtactctgatctttgcattgccaatttaaatccaactttcttgaagccaactttaaatactgggaactttaagcattgtcaatttcaagccaactttctccaacccaattttaaatacaggggtcacaccctcctcctcgccccctgcaacttgaaactccctgggaaagataacctcctggacctgggaaatgaggagtatttagaaacaactgcctcttggtaagcacacctcctatattttatccaaatcatgaaattataacaatagaagtaaacaaaaagccttcattcatcctctttcaaccataacctcggcataaaaagctcctgtactttacagagctgtattccaattttcgctgctcttaaaattttttttaatatcattgcttcccaattgactcacaataacgcagacatagggactgctggagactgtgaccttaaacagttaaagatgtctgcatatacgacatcatgtttggtgtggagagtacctagagattcctaaaaaagcaaagaggaagaaggtttgctgtgcgcatctgggtaccctgctctatctccagggttcccaggatctctctgttacagctggtttgcactgggattagttgctctttgcatgaggttgtagctgtggacgtgggttttgtagcgattgggacgactctggagatctattggctgctgggtttgtaaatttcattcattttggtccaatggcagaaggagagcgccggaagcagaaggacctctctcccctagctctctttttcttgcagagacatctttctcccatctctgtctgttagtacagagctcttattcagccactagctcggcctttcctgcttcaattgtaatgcttgttctgcccggggacacactattgacagcagaaacaatgaatttcctccaaacccggcaatgttggtggctcttgcattcctctggatgagcgaatctagttggggggttcccgaaggggaaggcgcctgggctttcaatacatcctcctgaatcatactgcgtttcaggttccttagaaaaatttggatgtgtaaaaagaactcttaacggcgatgcaggtcttccacagctaaggtaggtgcagttttaagacgtgtctttcgcatattattatccttattttaaaaagccgtttaaacaatttgacttgcagtggctctccagcaaaggagggaaagcctcactggcgatatttgagcttcatttcatctaatatttatttattttttccttttattattattattattggacaatttgggctggactctctcccatctgtctcgctccatttctttggtgtggatgggaatgtggacatcgatgtatggcttttacatgcaatctctccacaggaacatttggttttattttcacttaaaaataaaaatgcagaccaccaatgttgtttggaagcattttgctgcaatcagctgtttgaacagctctggggccatgtgcggtgtgtttaaaaagtagcgctgccttccatacaaattaaaggaagactgtggcggggaaaggaggggaaaaatatatatatatatacacacagacatatatatgcgtatgtgtgagtttgtgagtgtacacatacacacacacatatatatatgtacacacacacacatacatgcagtacaggggaaaaggagggaaaaggccagggctggagatggcgaaagcaggaggacttctgcaaactgtgagcatggaaggcttttcttctcttttctccccactccaaagccctcgtcttctttaagaaaaccaccactgcctggggtgcttcttttgggaggctggggttgggggttggtgccattaaccagagagaaaaggggaaataaagcttggttggggttgcattatgagatttttttttcccttccttcatctcctggcctcggataagataaggcttgggggatgcacgaaataatccaagtgattgattagacctggcatggcttggttgggctggagaaagatcggggcgcgctggaaaccccgcgtgaagatgaaatgactgtagctccgtgctgctcctccaaactcgggagcggtatccatgcacccctttcccgtgtgtgtgggttacgacgtgggtgggagtggtgaggcaagccgcaaaagtggggtagagctggtggttttgcttcttcggaagcctttgagtgtggcctggaccttagatgggggtgcagggcggtttgccgctgccaccctcggcaccatctctgaactgcccgcttttccggaggagcggaaaagttggaagccgaaaagacaggcgcccggagccctggtctaggtatcaggtgatccggagccctagtcggtgcccactaagaacaccccttctcccatcgggggttcggaggagtgttaagcctgcgggtctgccagtccctaaggtagggatgggggaggggtctgaggaatccgttccaataggcacaccatccccacagccctagaaaaggcaaccaccacccgctccttcctcccgcaccatcccatctcaaggctctctgctgacccgggccgatttcatctggtctcttctcccccgcttcccacctcccaattcccgcgcagctcggctccgttccctcccactcccctaggcggaactgaaagcgaagatcagccaagagcacagtcggaggcggcagagacggtggcgggtgagctaggggctgtgagacgaagcagggagagagtgaacttcagccccgtcccctccccactgccacggctggggcaacccaacccgcgcctgaagcggcttggcttgacctgcggaagcgcgggccgggatggcgtggggagagggaggtaggtgccactgggctgcagatgacgagtgggttgg

SEQ ID NO: 12713 - DNA, 6000 bp, Homo sapiens; identical to SEQ ID NO: 12625

SEQ ID NO: 12714 - DNA, 6000 bp, Homo sapiens; identical to SEQ ID NO: 12629

SEQ ID NO: 12715 - DNA, 6000 bp, Homo sapiens
caaattatgatagtaaaaatgcttggaattgagaaagtacttttaacttctcatatcatttgcatatgcactataatatttgtaggtcacagtatagttcccctacccctgtgatgacacatgaatgtttgttgttgcttttaaagagagaagcagaatgatttcacttgggataaagagaaatgaattcttaactaaggcttttgctttaagcattctctatccctttgaggtttatgttatcttttaattttccttaacatctttatttgtttatgtcttggagagtgacaactttttagctttattttagacattctgctgagcattttagatgaattaccttatttaaatatcactacaatattttgaggtggataaggttattatccctaattttagatgaaggaactgtagctttttgggacagctctgtccaaaaagctacgtaatgcaagccacacatgtaatttgaaattttctaaaaatattaaaaatacacagttgaaattaatttaataatatatttgttgaaccaatgagtcaatatattatttcatcatgtaactgatatgcaatgataatggtatattatgttatattatattatatattgaaacagagtcttgctctgttgcctaggctagagcaaaacgccacaattatagctcactgcagccttcgagtcctgggcctaagtaatgctcccaactcagcctcccgagtagcagggactacaggtgtgcactgccacacctggtgaattttttatttttagtatagatgaggtctcactatgttgcccaagctggtctggaactcctgagctcaagcaatcctcctgccttggtcctccaaggtgttgggattacaggcctgaaccatggcatctggtcaatatattttacatacgtgtgtgtgtgtgtgtgtgtgtgtgtgtgtgtttatgtgatataccttcaaaattgggtgtgtactttacactcgaagcatatgtcaactagggcaagccacatttcatgtgctcagtagccacatgtgggtagtggttatcttattggacaatacaggtctagagattaatttcttcacagccagacagctagaacatggcagagccaagactccaaatttggtcaaaaatcaaaggttttttcttaactactgagcatcactccctcctattgcaattgttgctgatggtttaatattaaacattaaaaatatcatggagaatgtgttttatccagtctttctgtttcattcccatacaccaatctactttcccaatagcaatgatgatctattgattatcacatgtctgtgcaatgaatagtgcaatttgtgatgtaaaacacaaaaaaagaatggaatttagtgcaaaataactgtcacatgataaatacaaattactctgttgtcatctatctgcatgacctgtacactccttctctgaacagagactataaggaaagacagatcacaatgagatgacagattgcttgataagggatgtttcatgcaaggtgaattaaaataacaatatttgattggcttcatcaatctcatatcaagggtgattttgtcagagagtgaaaatgtacatgaataggtgttgccaatgctcatctctctgttttctttcaccaggattctatggctgatcaatccttttttagatgggcatgttatttcttggttttaatcaattcttacaggcctgagaaacatccttactcaccaatgtttttgaaaactcttctttgatccattatataatcagaatggctttatagtttatccctcagagaatatgcatatttccatgtttatgggggtatatattaccataatttcccttttatgatcatagcagaaccctggtctaggttcctaatgggaacactgaagaaacaaaatgcaataaatatcacagttccttcctgacacctcatccaaaaaccagattcccacagtgccctttttgcttttgaggacttttgttagtcataaaatttttatgtaatgcacattctgaaaatgtgtcactacacaatctgaagaccgtatgctgaggggcagcacaatggactggacgtaacatgggttggaatttcctgtgtattttacagctataataccttgggcatttttaccgagtctctgttttctcatttgttaaggaaaacatgaagctaataatacctacctcttagaatggtttggaggattaatgggacaatttatataatgcagatggtacattaaaaacattcagtaacggggagtccttctgtctgtagtcagaaaagcgtcttcatcagtccttttagagttagaatgcctagagctttttgccaggtgccttttggttattccgttgctcattggtgccaccatcagacagaatacaggagaaaagaaaatgggggaaaattttcattattttcagatgtggatttctgtcagtcttttcaacagactcaatttcttaggtaactttctggtttgcttagttcaactagtagagtctccttggtctgtaagtaatgtttctaatctattcagatcacttcctattggactatccacctaaaactaaatgctctgctccatattatatatagaagaattcagattaactataaagtaaccatgtagctgaatttatgagttatataccctgaatagaaatctagagtctgttactctttagcgtcatggtcttgtgcaaatcacctgtcctctatgaatttcagtttcaggaattgcaaaatggaataataatattaacctcataagtctgtcatgataactttaaatactttaaacggtgacaaaatagttctcttctcctgcctagggattaaatggaaatcttcagaaatcaattaattgatatctaatgtggatgttatgaataattcttagtatttgaaagcactcccatagcatgcctgtgccacactgtccctggatcaatcagtgattttatttgcattgagttcctgccatctcccatgacacagtctcatacagtattgcaatccccaagagtcagagctgtaaccatttagcagcttctgatttcccctctcagacatttcctagctcccaagaagagtacaatgcatgtgctggatactgtgaataatgaagggacagttacaggaggagcaaaatgtaatagtgaagtgtctcctcacacctgtgcaagtaaatatttctctgttttctttcatgcagacctgcattgagctgcggtgctgatgtttctcctagtagcatggttttcggtataaaaatatgcaaaaaagtgacgtgaggaatatttgaaccaaggatttaaccttcaaaatatcaggaatgggaaaggaggcagctaagaagatggagaaggatatactggggaaataagtcataaggatttgcctttcagttaaaaaactttccctgaagcagctattagagaaaagcaacttattataattctgaaaatttttccttcttgatgttctatctctatgcagatgtcatctcctcttctattcagtagacaaaaaataaaaaatggatactgtgttattggtgctctgaaacattctctactttttctccttttatttcaggaaaaagagccacctactttcaaataattgcacagccccagaaagataagtttttctacaggataagcacagaaagtggattttccccataaaatcgtacacctttctggagagaggaatttagaaaattcacctggttaattttctggcgtctgggtaaatttaaggagttgttccttgaaacaagaataagagttgaccagctggggtggttttgatgttgttactactggttttttaatcacatgccaggaacgggagaattggcccctacttccttatatccacgacccttcgaaggcataaaccagccacattcctcctggtacctttagtggtccttggggacctggcacccggatgcccacccagccgtcgcccaccaggcagccagagctggctggcaagcaccaggcatgaggctccgggctggtttcctccctctcttgccccctttcctaccttggaaaagcgccgtccatgcccgcgacgctgcctggtctctggcagcaatgccacctgactcactcctgcttgctgtctggggtagccaaatgctaggtcgctagaacttctccttccctccttcacacacacacacacacacacacacacacacacacacagcccttcgctgctgtcagaggattaatctggaaaggcgatcgaagtaccagaccccgctcacagttgagtatgatatatgcggacagcctctcagctcaaactgtgactttgccaggcttctgcccctactacccctagtctgccttaagtatcctttgtatgagaaaacggtgctgtgggatgcttgttctctagctggagtcggcagccagcggtatcacaagaaaaacacacaagaaaaatcaaacttctctgagaaaatgtgaatgggtgaaacttaaagggaagcctaagagaagagtgagcagaggaccgaggagaacattgtatgcacagggttttgctcaggaaagctagcagcccgaaagcggcgcgttttcttcagcagcgggtcccgcacgcgagagtgctgccagcacgctttctgcctccttctccaggaggcgagcagtaacttcctaagcttacctccatctctcccccgcccttcttgctggttctccgtcagcggggaggggccgcccccggatcgatgggggatgtgaggtgcagggagtggggaccagaggggggtactcagcagttggtgctgcgccatcccttcccagcaggcggcccggacactggttcacttctctccccacgccttcccctggttcaccccccttccttcccctttctccccctctgttaagtccctccccctcgccattcaaaagggctggctcggcactggctccttgcagtcggcgaactgtctgggcgggaggagccgtgagcagtagctgcactcagctgcccgcgcggcaaagaggaaggcaagccaaacagagtgcgcagagtggcagtgccagcggcgacacaggcagcacaggcagcccgggctgcctgaatagcctcagaaacaacctcagcgactccggctgctctgcggactgcgagctgtggcggtagagcccgctacagcagtcgcagtctccgtggagcgggcggaagccttttttctccctttcgtttacctcttcattctactctaaaggcatcgttattaggtaagtaaccggactgggtacctgtacagggtgctgtcagggaggcgtgaggtccacacttagtgcgcggacactgcccgctgcctgcccctgaggtctgaactatgacaacggggtggttttaaagacgcttctgctattctcccttcccccttctcttcccgggagggaagagaaagagcaaaccccggaggtgagcgcagggagaatatctttttgcactaccaccgctgcgcttcgttactttgggaaaactctcacttttgtcagaaatgtgtcggcgcatgaatttccccgacattggctgtgcaaaaaggtctctccctttaaagggtacagccagcttcagcgaggctgagggaaactctaaggttggggcgggtgttgacaaaagagcacgtcccggactcccagactcgcccggctgagagattggagctgaggggcgatgcctctagctgagaaactacccctggcctcgctgcgctcctctgggggctcgggtttggatccctgccaggctggctccaacccttgagggtacgacccttggcgcagagaggagggccaggagcgcacagggttcccggtgctgtttctcttggcgctcacctccccgcccttccttcccgccctatttatggggctgtactcagccagcacctgctggatgtggagatggtaggtgtgag

SEQ ID NO: 12716 - DNA, 6000 bp, Homo sapiens
cgagggacctttggttaccttcttaaaatgtgattatctagaaaatttacagaatgtgaaattaatgcctatttgataaaaaatatttaatatataaagcaatgcctacagatatgtatatatatcacatagttgttatacagattaaatgaaataactgatttaaaatcacatagagcaattcaaatactacaccaagtggaaattatcctttttgatgaatttaggacttatttattatgataatctggtacttgttgacaaagtacagtaaaataattattagatactgaaacaagcaatattacattcaccctgaggcaatagaagaatgtgtgatgatagacaaacgttatatttttgccatgaagaatgtgtctcttgcttgattattctgtaaagccatgtttcaaatgttccctaaatcatatatcaaaaatccagaaaaattaatatagaagagaaacctttagaatttgtcttattaagtgctatttgagcttgattattatcagattttgaaaccctgttagagaacaccacactaactgttgttggaatgatagaatgaatcagcaaacaataaataatttggagaaggaagcagcattgatggaatccacttctcagagaagtttagacccaaatgtgaaaaattagacatgtacaataagtacagtaagcaagctgtttgtggaataaaatttaacaaaccagttatataattactgtgccttattaaattttttattttgacatctcaagtttcagaatacacaggaaataattacataaaattggacagccaatgcccttgcccgcctctgcttgctgtggtcagttcctctgaaaatactaggtttatcggttgctccaatttgtctttctcccagtgtggttacttttattgcaatgttctagattcctgtcaacctcaagaactaccttattgtttacccaggctgtgaaagaagctttgcttgtatttgagaccaagaacacaacagtagtgaccacctaacatattatggctgttaaatggtgtatttttgacttaatgaaacattgaaataattggaatgatgagatttaagtggagttaggataatgggcagcagatagatatttcttatcttcatgtaatacttaaatttgtactattgtagaaattgtacaaaaattgtagcatataaaccattcactcatgtgtttgttgttgtagcatatgatccagtaattcacatagaattcatttaaatatattacaaatgaaaccagcactataatgcagaaaaaatttaaaaaatatcaaggaaattatgccttgaaattcttctgacaaagcatttgaacattaattgtgtggtttgaaatttctagaattgcgtatagtagatgcctagctcccttacctactcagagatgataaaatgaacttccatttttgctttatatatctttaaattttcagagatgcttattttatttctgcttttgctttctctaattgtcattattgtgtccctctaaatacaactattgcttacccaaccgtgatgtcttgctgataaagggcatcacttaaatagcatgggcactactggaacttgtcaaaaattttagttctttatatcttcttttgtgttgtttcctttatcaatttccaaactaacattaatctatagtaggagtgggttgtaggagaagggcaaagaaatttaaggttaccttgtcacatttttcatgagacagaaaaattagaatgtaatttacatacattaagatacgtatgtaggcatattttccctggatatctgagttaaatgtgccatgcttccataagactaagcagtgattatttatatccatatttagtagctaaatttctgtactgttcattcaaagaattaaactcagcattttcaaagaaaacttaataaattttaaagataataaattttcaagtggcaaatgtgagagttgaaatcaaaatctggagattgaggttacttaaacatgcatgttcacatcctggtagaagcagagatgagttcattatacagtaattgaacactgaattaaagacatactagaatatattatcaaatataaactctgttttgttcactgatgtaccttcagtgtctagaactgtgcttgacatataaaaattgcttaataagtatttgttgaataagtggctaaacctccatgagttcatttcatctcaaactctttattaactagagggtgaatattccttctaggttggcaacatatatattcacttaagctttagaaatggtattttttctcaatatttcttccctgtttttaaaaccactgaatgaatttccggttatgaaacacattttaaaatgttttatatgatgatggtattgtggaagacagtgtggcaattcctcaaggatctagaactagaaataccatttgacccagccatcccattactgggtatatacccaaaggattataaatcatgctgctataaagacacacgcacatgtatgtttattgtggcactattcacaatagcaaagacttggaaccaacccaaatgtccatcaatgatagactggattaagaaaatgtggcacatatacactgtggaatactatgcagccataaaaaaggatgagttcatgtcctttttaaggacaaggatgaagctggaaaccatcattctcagcaaactattgcaaggacagaaaaccaaacaccacatgttctcactcataggtgggaattgaacaatgagaacacttggacacagggtggggaacatcacacatcggggcctgttgtggggtgggaggaggggggaagggtagcattaggagatatacctaatgttaaatgacgagttaatgggtgcagcacaccaacatggcacatgtatacatatgtaacaaacctgcatgttgtgcacatgtaccctagaacttaaagtataattaaaaaaattaaaaataaagatagagtagaacagatttagaatggattgagggagggtgacttcttggaactagatcactctattaattatttatgttgtgtagagatattgcgacatgcatgcaatgcttttatttctttattttgctttattttgtttttcattttgggcggttatcccaggaattcaaggtggttttatcttttttttttttttaatttaacttttattctgagttcaggggtacaagtgtaggtttatgtaagtaaacctgtgtcatgggggtttgttgtacagattatttcgtcacccaggtattaagcctagtacccattaatttttcctgatcctctccctcctcccatcttccaacctccaataggccccagtgtgtgttgttcccctgtatatgtccatgagttctcatcatttagctcccacttataagtcagaatatcctgcaatgtttttaaaaacagtctgtagtattcttctgccagttgtaataatgtgtaatacctaagggtaagataagaatagagcgataattttaattccaattgtcactgccccatttttatttctgcttatgtttgcatgacatttataaaatcacataagcatccaaaacgtcttagatatgctagattcacagcatatagaacacatatatgtgtgcatattagctggtagtatcaatggggtatttttaatctcaccttcataacagagtataaaaccaaaaattcacaagactgaattttgagcgagtttttatattatgtaatcccaatgcacatcattgtacaaatgatgctaaaaatactataccacaggcaacagtgtttttatgttgtttactaggataaataatgtcttcacctctagcattactcactatcataactaacatattttatatatgataccaactgcttaacataggaaagtcattgaattcataatatatatttttaaaatgttgtgataaaaattaatgagatattttaagtctactgctgacctaaactatcttgattgttgcaacagatgcatttatttgattattgattgtaaatagaaagatttctttttttccaattttgtgtattccaacattggcatatgcatattttaaaaaatgcagatgtgcagctatgcaatgggacagttatttcatataacacattgcttggcataaccagagcacaatatccataacaagttatttatatcatatgtagtcctcctgtttttagaacaattactaaaacttgttgatgttatcgattaccaataaatattgagaaattccttaattggttacctatatgcattaatacatttctggaatggaattttaaataaccacctgaacactgagttttcaaaactgctaaataccttaatagttgcattaaccttcatttaattataaaagtatgacatctgataggctttagctcagtgtgatacaaatttaattttgtttatataatatatcatctacaagtactatccagaagaagcacattagaatgtttaattatactagagattaaaagatatttaatatataaacttgagaataaataaaatagagaataagaattgagaattatgaaaggaaactgaaggtaaaatttgcagattttaagaaaatcaaaatccctcattgaattttgtcagaagagttcaagaactgaaataattttaaagctttcagtgagtgaaaaataatagggagaagtagcaagagagattgatttttgactcactttcaactcggtactgtttttaaatgcctttcttattttcaagcccttctcaagctgttccttgaagttgtataattcctgttagtctatagatgtgaaaacccatttttatatgaactaccttctgcgttctataaacataaattctcagggttgggatgtcttctagtctaactctcccattgaatgtttggacgtcatctaccaaatccgtgtatctaaagcaaatatagtagatctaatctggtggtccagtacctccaaagatatggaatacactcctgaaatatcctgaaaccttttttttttcagaatcctttaataagcagttatgtcaatctgaaagttgcttacttgtactttatattaatagctattcttgtttttcttatccaaagaaaaatcctctaatccccttttcacatgatagttgttaccatgtttaggcgttagtcacatcaacccctctcctctcccaaacttctcttcttcaaatcaaactttattagtccctcctttataatgattccttgcctccttttatccagatcaattttttttcactttgatgcccagagctgaagaaatggactattgtataaattattcattgccaagagaataattgcattttaaacccatgttataacaaagaataatgattatattttgtgatttgtaacaaataccctttattttcccttaactattgaattaaatattttaattatttgtattctctttaactatcttggtatattaaagtattatcttttatatatttatcaatggtggacacttttataggtactctgtgtcatttttgatactgtaggtatcttatttcatttatctttattcttaatgtacgaattcataatatttgattcagaacagatttatcactaattaacagagtgtcaattatgctaacatctcatttactgattttaatttaaaacagtttttgttaacatgcatgtttagggttggcttcttaataatttcttcttcctcttctctctctcctcttcttttggtcagtgttgtgcgggttaatacaacaaactgtcacaagtgtttgttgtccgggacgtacattttcgcggtcctgctagtatgcgtggtgttccactctggcgcccaggagaaaaactacaccatccgagaagaaattccagaaaacgtcctgataggcaacttgttgaaagaccttaacttgtcgctgattccaaacaagtcctt

SEQ ID NO: 12717 - DNA, 3621 bp, Homo sapiens
cagtagagagccgaaagttggaagaagcacgtaaaacaggtatgtagcttcaagaagacactccttctctgtaggaacagttcccttactgtctcacaccaatctccttcttagtctgacctatgtctttgtgcaatcaatagtttagattttcatctcagaatatgtcaaccatggccacagtgccctgtatacttgctcacaaggagagggggaaggtttcgtgctttcattaaaaggaggaggaccaagcagcatcccctttacatgtctctcctgacttagctcctctaagcaatccagacttgcagaccaaaggtggaaggacagcaggtgtcagctccccaaagctggagaggaaatagagaagggtgggagaagaggtgaagaagatgattaaaataaagtttttaccttaaagaagggggtgctgttccaagattgagaaggagggttcagccgtggcaatgagatgggggagataggtgcaatgaagggggctgccagtgccagctgccttccagctgtcaacgcctgagcttatacaggtttacacagctttataagcgacggtccaggctgggttgtggccacttccggactcacgcccagtactgggggcactggaggagggtgaaggcaggcagggacacagccaaggtgctccaggtcgctcagagagtcttcaggattcctgagtcgccgagtctatggcatgcgctccgggccctgactacaagctggttttcaaaggaagtttgtggtttttcttttcttctctctctcttttttgttctcatcaggacgaagaaaaattaggcaaggacaagctccctggaggaggaggggcctgcccagcgctggtggatttccatcaggactttctgacccggtcagcagctttgtgatcagcagagagggagcgagaaacaggagagaaaaacaacagaccctttctcttccctctgcctgcctctagaagggacggagcgcttgtgcctctctggtgagaatagggaagagcaagtgcccttgctaagtagggaggagaagggctggacagaagcagcttgttggatctgggctctctctctgggtatggcagtcctttgctctggatccacagaagcaggagcaaagagcacgatatttgcatgtattactcaattaatgttaaaaacaaacaaacaaacccagctcttttccctctggagccctccagagagctcctttccaagtccttgctgtatcatttttaagtctagaaatgaaactggttgggttgtgcacctggtagagtgcagagggtgtggtagaagccccaggctctgggcgcgatggctgacgcctgtaatcccagcactttgggaagccaaggcgggcggatcacaaggtcaagagatcaagaccaacctggccaacatagtgaaaccccatctctactaaaaatacaaaaattagcagggcatggtggcacatgcctgtagtcccagctactcgggaggctgaggcaggagaatcgcttgaacccgggaggtggaggttgcagtgagccaagatcctgccactgcactccagcctgaagacggagcaagactccgtctcaaaaagaagaagaagaagaaaagaactggcagagcaggcaggagatccaacacgcctgtgctctggatcttggttccactgcaggcctctcatcagtcacctcctctcgatttacagctggggaagcaggaaaagctggtgtgaggctgacggtaggaaataaagggatagataaataaatgagggaatttttgatgatgagtgtccatttatttgcagtacctgcactactctgcggctggaaagtggcagttaagggaggttggaacctaactccacattctgaagggttccctaaactctatgtacagggccgccacaggatgaaatttcaagcaactctaaaggctgaaagagcaattggaacaattagggtggcagagagcaaaaagccaaggttacaaccgtccaagaaaggaagaagatatttgccgaggctgtagaaaaaaacaggctacagagttgcaaagggagaagcagcaggagttggcaggagactgtaggtgttaacaagaggggtcaaagattattctaatgttctcctaacatgaacaaccacaaaattggtggcgactgagtcagtttggtaaagggcagaatttgtagaaagaagatgatctgttttgccaagtgtcatttaaaatgtcaccagatgctcggtgtgatatatgtaaagatgttatacttggcctgatctgagagggaaagttcagatgccacaataatgggttactgtgacacatacacatttgtttaccgaacgactgatccctcagaaaacaatccttccctcggttgctagggacattgcggagttgcgggactacgtttcccacgtcgccccacgccacgcccccttggcctcgccggaaagacgtcccaggagcctctgggcgtagagccccgcctccgccgctgggggcggggcgacgccggactccggagcgcccgcttacgcagttcctcccggggtcggaggccgattcgccgtgtggcgggttcgagtcccgcctcctgactctggcctctagtccctgagtcccgggcgggctgcattcgtcggggaaacctctcctcgaccaggggcacctctactcgaccaggggcgacggcgtactttgggcttcatcatggaggactacctgcagggttgtcgagctgctctgcaggtaacgaatccctgtctgtgactgtaaggaatggagcacggggtccaggaaggacgaagacgtgggatctgggggagcctcgacggtccgtgtggagggaacactgagttgtggggaggggggttggggcctgatcagttttggggcatgaggagcgaggagcgagaagccagtttaggagcgtgagaatgctgcttgttcagtctcccggtttttggctccccgcctttggggtccgcctgagagcggggagaagtcttgggtctgaatcctgcatttgagcctctgcttgctgtcatcttggtcagttccatcaaaaaaaccaggactgtgccgccgccagcctagccccgcgaggtgtgtttattcttttctccccgcccctctttgagttctccgctcccaaggcttcgcttggcccactggcctccaggtgaacctcgggggtgtggagggaaccggtgctcacggccttatttcctccgaatggcagtttctgtctggcgggctgaactcatttctaggttagaagtagtcacagtattttactttaagtcagtgtttttaagccaaacatacaaaatccatcaggcatatttgttgacccacaaccagcattcctttgcctccaggtttctcctttggccttaacgcacacaaatgacataaaaattctccacttggaagggataagcacaaagtgtgtttggaatcaaaaccataaatatgactactcaatgctttgtggcttatttttggtgctctctgactcagttggactcacccagccatgctgagccgtcatgaggcattaggctgttatccccagttagcagcaaaaagctaa

SEQ ID NO: 12718 - DNA, 3547 bp, Homo sapiens
ctgtgtgtgtatgcctcaggttcaggtgcacctgcctttgtggggagagcacagcttccctgcataactgctggagggtgggtcgtcgagtgctgctgtgtgtgtgggcctcaggttcaggtgcacctgcctttgtggggagagcacagcttccctgcataactgctggagggtgggtcgtggagtgctgctctgtgtgtatgcctcgggttcaggtgcacctgcctttgtgggaagagcacagcttctctgcataactgctggagggtgggtcgtccagtgctgctgtgtgtgtatgcctcaggttcaggtgcacctgcctttgtgggaagagcacagcttccctgcataactgctggagggcgggtcatcgagtgctgctgtgtgtgtatgcctcgggttcaggtgcacctgcctttgtgggaagagcacagcttccctgcataactgctggagggcggatcattgagtgctgctctgtgtgtgtgtgtgtgtgtgtgtgtgtgtgtgtgtgtgccttgggttcaggtgcacctgcctttgtgggaatagcacagcttccctgcataactgctggagggcgggtcgtggagtgctgctgtgtgtgtgtgtgtgtgtgtatgcctcgggttcaggtgcacctgcctttgtggtaagagcacagcttccctgcataactgctggagggcgggtcatcgagtgctgctgtgtgtgtgggcctcaggttcaggtgcacctgcctttgtgggaagggcacagcttccctgcataactgctggagggtgggtcgtggagtgctgctctgtgtgtatgcctcaggttcaggtgcacctgcctttgtggggagagcacagcttccctgcataactgctggagggcgggtcatggagtgctgctgctgtgtgtgtgtgtgtgtgtgtgtatgcctcgggttcaggtgcacctgccttagtggggagagcacagcttccctgcataactgctggagggcgggtcatcgagtgctgctctgtgtgtatgccatgggttcaggtgcacctgcctttgtgggaagagcacagcttccccgcataactgctggagggtgggtcatcgagtgctgctgtgtgtgtgggccacgggttcaggtgcacctgcctttgtggggagagcacagcttccctgcataactgctggagggtgggtcatcgagtgctgtgtgtgtgggccacaggttcaggtgcacctgcctttgtggggagagcacagcttccctgcataactgctggagggcggatcattgagtgctgctctgtgtgtatgcctcaggttcaggtgcacctgcctttgtgggaagagcacagcttccctgcataactgctggagggcgggatcttcccaaggggaagttgggaggtgctcaggcggagcaaatggatttaacttctgggctgggagaatgtggtacccccgtggaagtctccctgaggaaggaaaggaaggagctggagggagggtgtgtgtgtcttaggaggggacgcacttcaggtgagagcgggcatggcactaggaggagccccatgagcccagagtggtggcacgtagaggcctaagggaccatgccagcagaccccaccgcccgtgctccaccaggagcctgacattgttctctgagatcagggggctgtctctgtgtactgcccaggactgtggcatttttgtgcataaaaaaaaaaaaaaactgtgtgtctaacacagacggggtatgaggagagccactggtctctcctgaccttaaaaatatttttttagttcatttttagtgagtatggaaattactgaaggtacaaatcactctgaagataggttcttgtgtgcgaaggtcatcagtgaatcttcattctcagagttgataaatggttgtgagcgctcaagggtatcagattcaacgatgagtctgaggatagtacagctttcctattcagtttcaaggaaaatcatataaagcccagaccgtaatttgtcaggaatgtttgaagtgtggtgtgatggatgtcttcaccgtgctttaggatgattactgagggagaacggaaggaaggggtctggtacttgcacctttcagtagaattagtgtgaatgccacagcgaccaagctatgttcaggtgtctgcaggcagtggtggccttgatgatggattttctgaaatgggaattcgtgaagtcctctaacaaaactaagtgcgaacttctcaacttagctggtgactgcatccttgaaaaattctgtgtgtaaaatgatacagaaccatttcttggttatctgttaaataagagtgcatgtccagccgcgatgactgtggacggccttggaggtctgggaggccacgaaggactcccacacacagcagggtgtgaacccaccaggcagtgctttggccccctcccaggagtcatggcagccgacacgtcacctggagtgtctagaaaaccactaccttagagcccccactgcttttcctggtgcctccaggtatagatcacaaactcagtgtcccagaaagattttccttttactttaactcctgttgttgtttgttttcaggcacgtggactccctttaatccagtgactgtcaggtcgatcatatgtaagtatcggcagacggaccaacctgggctgctttgtatccgacccgcttgggtacccgcttgtgtttcctttgtctgtgggtccgtatcactttgctcccttctggaattccacttagatgagcgtcggccctttcatccctctccctccgtctctgtaccttttcacatctctccgtgtatgtttgctctattcttgattctgtttatttttaatgtacggtgtaacctgtcctttcagtttctaattctaaagatgacatatatttaaaatttctaaattattagttactttcacatcttatctgggtgtttttgatagacattgcttatttatttttgtgattccattctttattcaaatatttcatatgatagtcttcagttttaagaacatgcttttttgaaaagcgctagatatttgtgacatggagctccttgactgtgtttgaagtccttgggagggtggtctacagccagatatttttcctgctcaagcccacacagagtgaccaacttccttgatgcttctgtaatttttgtttgttttgtgggttcatgtgtagccttaatgtgagggtctgcatcatttctttgggtccagggtctccccagctgtataggcagctgggtttttgtttgtttcttttaagagacagggtgtccctgtgctgcccaggcctggtctggaattcctgggctcacgcaatcctcctgcctcagcctcccaaaaagtggggattacaggtgtgcacccccatgcccagacggtagccggggtgtgagctgaggctccaggcgcaggcaggtgttcaggagagtcgtgctgtgtctccatcccccgtagccaggtgggagctgcagctccaggggcaggcaggcctgggaggcaggtgttcaggagagtcatgtttcca

SEQ ID NO: 12719 - DNA, 3461 bp, Homo sapiens
agacggagtttcactcttgttgcccaggctggagtgcaatggcgtgatcttggctcaccacaacctccgcctcccgggttcaagcgattctcctgcctcagccccctgagtagctgggattacaggcgcccgccaccgcacccggctaatttttatatttttagtagagacggggtttctccatgttggtcaggctggtctcgaagtcccaatctcaggtgatctgcccgcctcggcctcccaaaatgcttggattataggcgtgagccaccgcacccgaccttctttatccatttttctttctttctttctttctctttctttctttcctttctttccttctttccttctttctttctttcttttttttttttttttttttgagatggagtcttgcacacttgcctgggctggaatgcagtggcgtgatctcggcttactgcaacctctgcctcccgggttcaaacgattctcctgcctcagcctcacgagtagctgagcttacaggcgcccgccaccacaccatgctaatttttgtatttttagtagagacggggtttcaccatcttggccaggctggtctcaaactcctgacctcgtgattcaccagcctctgcctctcaaagtgctgggattacaagcgtgagccaccacacccggcctactttatccatttttcaaaggaggaaagtgagactcagagaagagaagtgaccgcacagtcaccagagagtacgttggggaacctagatttgaaagcagattttagaaatcaacattgtgcaaggcatactagctgtgaggtaggacttgatggtctagtttctcaatgtggtcctcagtgcctggtttgcaactaactgagtagtttcttacagatccaggcttccaggcccaacccacatctattgaataggaatctcttaggctagatttcaggaatttatatttttcagaagctttcctagtgatgcttatgcacattaaagtttgagcacagattgctctaaggagccttcatggagaaggcagcatggagtttgtctctgaagggtggagaggttggggaggaggtgccccatatcaggctcgtctgatagaggattcaagcttgggcctttcactgtctctctgcattgtggtcatcattgtccctcctcatcaacctttccaattttctcttcagcctcctcccaaaacctcaacagccttttctctggcttcgctcaacagaattttctgcaatctgggaacagggaggtggtgcccacacagagatgaattagcatgtaaaggacacacacatacagggcagacaagtagagggcactcagtcacaggcagacaggaagggggcagagatgggtaaacaagaaaaggatacaaaatcacaagcggacagggaaggactggcgcacagcagatcatcacaagcagacataaatgggctggacaaggactcctataaacatggatggaaaggaagggcacttacagagacagatgtaagaaagtcacatacaaagccataagaagcagcactcacagacgtaaaggaatgtaaaggacatctgcaaatggataggtgggaggcacagccaggtaggacggactcaagtgattcctcagaacggtcgccctttaccccactgagctgagaagggattaacctcaagtacctggcccggattgtcagagccttgcccatctttgtctcactggttgctgcagagggaggccaggccccaggctccagggtaaggtgtgttcctggatgtgcaccccgatcctggtgagggagatcacctcctcccttttacgtcacatttatttcaactcttagatgcttattattagacctgcagcctcgcttctttctggcttgcagcccaatttcgtacgggtcccttgggcccttgctctttttgggatgttttattctaattcccagtcccagccgactgggaagcttcaccagttcatttacagatcactttgcctttaagcaattttcctcaatccgccagcttcccagactccctttcgttcccgacatcacttgcagtttctaagagcatcatatctcccagaaatcttagtggccaaggggctaccctagggaacttcaagtaccgaaatgctctcctgtccgtctcagtgactgccgtggtgaccggtggggcttgtagtcacctcggaattgttaggcgacgaaaaaaactactcaccccaggtgtccctgcgtcagaggcgggtttctctcctgtctccctttgctcgcccctaaatccttcctcggactccaactcccgccgtgccttgcgctgagatccctgcggcaaagaaccgggctgtgtccaaagtgttctctggaagttgtagttcctgtattggtgaggcaaggaggaggcggagtgactcggcggccattagctgtgtgtagttgcccgggactaggagcttaagtgaagaggtacgccttgttcggtggaaatcagccgtagccatgagtttctgccggggctagccctagagtacggagcaggcggacttttcggttccccgccccgccaggtggcggggcctactaggcctccgggcatccccggtctcaagtaggcctcatctgccggcaagggcgcccgaaacgcgggaggcgccatgtcgctggttgcttacgccagcagcgatgagagcgagccggatgaggctgagcccgagccggaggaagaggaggcggtggctcctacatctgggcccgctttagggggcttgttcgcttctctccctgcgcccaagggtccggccttgctgcctccgccccctcagatgctggcgccagcctttcccccgccgctgttgcttcccccacccaccggagaccccaggcttcagcctcctccccccttgcccttcggcctgggaggcttccccccacctccaggcgtgagcccggctgaagcggcgggagttggggagggactgggattggggttgccctcgccccgaggccctggcctcaatctgccccctccaattggcggtgccggtcccccgctggggcttcccaagccaaagaagaggaaagagcccgtgaagatcgcggcgccggagttgcataagggagatgtgagtatccggggaaggcacccccaaactgtccatcgggtttgagtcggctgtaggagggacatgtggagatttcagaactccttcctacaaacgcatccgtggattcaaggccactggaatcctcttataatgcgattaattgagctgaagttggtcaacttgggggagtttgggtgtttgcccatgtgggtttcctgaagctgggcttgcctgcagaaggccacatgtcatcatcacctggtactgacaggcctagggacacttggatccgctcccccttctttgcatcttcacttcagtccggctttttcccctttcctcctactgag

SEQ ID NO: 12720 - DNA, 3442 bp, Homo sapiens
ctatgcagaagggaggcctaaatgtcccttacacacaggagggaggtccataggttccttacaactggaaagctccatgaagcaggcagcccttccctggggatcagggaggcctccaccagggcaacccctccctcatttgagactctcagtgatgcatatgaaacttggaaatttccctcctgcttttgggagttggaagtatctgaggaagtgatggggagagagctctgtcctgtgcccccggagggaggactggggaggattaaggactatttgccaaatgtgcttggggatgaaggaaagggttccttggatcccccaacctatctgcctttgggtggaaaggccacccacctggaaggggcttctgagctcatgccttccctggcaacccctgcctcaaggtgcaaggccccagaaccaccttccgtgatccagagccagggctactctttcctcccacccagaaagcttattttagcaacaaagggagcgagatgaatggagagttgcagcttctccacgggttggcttgggccttcaccagaaatgagagtctcattacccaaccccaattcaaaggataattaacagatggtataatttccaagcattctctgcaccacatggctattaggtgaagaacaaaatgcccacgcagcccctagatccttccaaactccagagtctgaggaagtctagagaggcagagccctgcggaggcgtgtaacccacgcctccatctccagagctgcccttggccttgctcagaggaagaaagctcctgtttggtcaaaggggagggcatttccttgagccatgggtcctcctcctacttctatccatcctgccaggagcacagtctaaccctaatctttcttgctgtacccaaggcccatctcctttcctgtttccccaggggaaaagagaaaagctgatttctcatccttggcctcactgtgtggtcacacagacactccttgggcctggggctgggggatcctctgctgtgacccagtgagagtggcaccactgtgaccgggggcagtggtagaagggagcacctgatccagtgcttttcagatgggttcctccagaccctcaagttgcacagagcagcccagggatttcttggttgggggagtggtggagaggggcaaggccctgaccccctcacttcaacccagcagcactactcatctgttctatattctggccttccacttcagatttcttttgaagaaaagaattctactgctaaataaacatttgagaaccattcaccttattcaatcccctcattttacaaaaagggacattgaggcacagaatttgagcaaggtcacatagctgtggtgttggaggctgggacccaggcccaggcatccccccaggccagggcatccccccagggactacctgactgggcccctggctgctccaggatgtagggaagccttttctgggtcgcctgcacggctcctgcctggctctccgtgtggtccagcttcatgtctggtcctcttggagaacccctggaatcctgcacaccctctcaaatgaagctgccttggagagggtcaggagcccgggtaccaggtaggcctcctcgctggtcacaaaactgtggcggaaggagggggtagccgcaggacatggacagggaggcaggaggggatgagaggccgcctctctagacaggacctcagggggcagtgtaagccccttgtctagaatccaggaagcctgtgttaaagctaggctccaccgcagccggcctccgaatctggtgacagtgtgtttgcaccacctggcttccacccactctgacccttctaatttacttccctggaaaagcccaagtggtgtccaacatgaggctggggtcattcttccaacagcccgaccccaaggggcatgctggtcagacaacagcctcgctggtggggtggaggggacggtagggagcgagtgggcccggtgactcattgtgggtgcttctctgggattttggaggctttgttgtgttgctcagggcccttttaactctgtctgacctatgggaggggacagcaacgagggcttttatgactggaatgaactggaaacttggcctctgagagcccttaaaatgttttggaaacctctaggcatacttagggtacttccaccatgattatcatcggctgtgtggcttccgatcgctaattcgcaccgggcatctggcgaggccggcctggggaaattgggatggagggtcctgctggagggaatcctggcgctttgggcggaggagtgctctgggtggggcccacctcctccagcgcggccggcgttgccgctttaaggcggccgcggcgcgagcaggtctatggtaatgagccgccgccgcgactctgcagagctcgcccgcccgccggggaggcgagggagcgcggggctgggcccggggccgcggcgacaggcagcagccgcggcggggacgcggggcgcgagcgggcggcgcgggaccgtcgggggccgccggggccgggccggggtcggggcgcacggctacgcgggcgcaggtgggcgatcccataggggcggagggggcaccccggctccggaacccggggcccggcaaggccaggggcgccgcggggcccccgggcgcaggtggtgagtgcccggagcgcaggtggaggcgcggcggcagcccgcggtgctcagggtgacccgggagcgggtctggctcagggggcagtgggagcccgggctcgtcggagggtgcagcgcggggtcccgccgagccatccagacgcaggccccgcggggcgcacgggaggcccccggggactggcgccctggcccgggcatgaggcgcggcggggccggcaggagccggaggaggagccgccgccgccgttgacccggccgccggccgggagctgggagagatgcggagcccggccaccggcgtccccctcccaacgccgccgccgccgctgctgctgctgttgctgctgctgctgccgccgccactattgggagaccaagtggggccctgtcgttccttggggtccaggggacgaggctcttcgggggcctgcgcccccatgggctggctctgtccatcctcagcgtcgaacctctggctctacaccagccgctgcagggatgcgggcactgagctgactggccacctggtaccccaccacgatggcctgagggtttggtgtccagaatccgaggcccatattcccctaccaccagctcctgaaggctgcccctggagctgtcgcctcctgggcattggaggccacctttccccacagggcaagctcacactgcccgaggagcacccgtgcttaaaggctccacggctcagatgccagtcctgcaagctggcacaggcccccgggctcagggcaggggaaaggtcaccagaagagtccct

SEQ ID NO: 12721 - DNA, 3441 bp, Homo sapiens
ataggggtttccagagagactgggaatggtcccagctacagggccgtcatactgagagggtgttttggaaattggtgcacaacatggacacttcagtttccccccgtgggggcgtggagaaggaaaagtatttttaaagcattcacatccccagtcgaattcctggtcctttttatgtttcctcagtcctggaaggtgggaatgatctggagaccaggagtaagaagacctgagtttagatccccagcctggattcagttctgagtgcctcagttttcccttccacaaaatgaggttggtaatgcccactttaccaccattttttttttctttttttttttgagatggagtctagctctgtctccaggctggagtgcagtggcgcgatctcggctcacgggaacatctgccgcccaggttcaagcgattctcctgcctcagcctcctgagtagctgggatcacaggcgtgtgccactacacctggctaatttttgtatttttagtagagatggggtttcaccatgttggccgggatggtctcgatttcctgacctcatgatcctcccacctcggcctcctgaagtgctgggattacaggcgtgagccaccgcgcccatctactttaccaccattttaaggcttgagtgaggtggcatcataagaaacttttgctcagtccacattctaaataaatgaggaaactgaggctcaaagaaaggaaggaataatgacaacaataataccattggtattattagctaatatcataggtaatatttattgagtgcgacattctagccgctgtgccagggcttttactgcaagaagtgaggtttgggagggcaggagctcttatctgttttgtcaccattgttattccctagtgtctacctagtacagagccctacacagagtaggtgctcaaaacattgttgttgatcatctagattatatcagttacgtgatgttgtcgaagtgggtgttattgttgtccctcttgtacagatagaaagcctgaggttcagagaggtaaagccacttgacgagagtcacacagcttctcactggtgttagcgcatccttactttggggtgtgcagggtgtgctggtgtcagctcgggagagtggattgtgcccatctcttcccagtgcagcattcagtgatatcaatagcttgaaattggcatggccaatttcagtaagggtatttaacaccatcaaaattagtaaccaccacaaatcagggctttttcttacttttttttttttttttttttttttaaagacagctgcaggtgaagggtgttgggggatggaagaccagccttgcttctgcttggcagcctggagttgggggctttttggcagagccaagtggagccaggccagaaggcctgcgccccactgcagctcccctaaagtatgcgatttgggaagaaaccctttatgagatggcttttgtagtgtacggtgtgagttatgcagtgcagcagcccctgacttgggaacaggttggtatgagcctgaattccaggccaaaatgtctggcctttaacctgaaagtgacaggagccacggatggtcgttaagcaggggaaaaacctgacaggatggtgccctaagatttgtcattgtgccaagggattggggggtaagtcagggtgggtgatagggaagaggtgcggcagttggccaggggagccaggaggctaacagaagctcctcattttctgagtgtgtcctgcgtacaaacacattatcttgttactttacacatgcatgcctgagggaaggagaagcctctgtctgtagatgaggatatcagagaagttctgaaacaaaacagcaaagggctgatctacccaggcttcctgcccccaaagtctcacattctcactcctccctccctcctgcaccccagcttgctgttccatcttggctctgggcttccttgccaaatgtcaggcgaactccagctccattgccgagtgagaccttctgcgcccagtgccgctcccacaccagcccctaggtccttgccagcattctccccccagcccccccactgccagctcagctttttctggggaaggagcctgggatcagggccagagtgggatgtccagctgtcagtctcctcggggtcttgggaccacagccaaggaccaggactgaggaggggaggtctcagggtctaagaggcacactcagtcccccactaaggattcatctggaggataatgctttatttgtgggtacagacccaactgtgccttaacatgctgtgtgactttgggcaagttgtgtaacctctctgaacctttcttcatctgttaaatgcctaattatttatgaggatccaatccagcaacacatgccatgcctccaaatgcaaaaagtggctgaggctgggcgctgattgcttcctttccttttagtgattttcatgtgttcccacatgttgcataatggctgtattgcagaaaacaacatattgtattagagtttaaacagaggaggagaaggtgtgggggttacagaatgttataggatgtcagagctgtaaagggcctcaaagaacccaacgatacatttcgcctttcacaggaggggcaactgaagacggaggtgcccaaggtcagaaggaagcaccacacagaggtgaggtggtattcgtttgttttgtttttaagaatagtacatgttcatttcattcttatttttaaagcaactgttatatttgaaaaatacccaaaaggaaaaatggtaaacttccctatcaaaaaaacttgcctataattctactacctagtgataatgattgtaaactttttttttttttaattgagacagtttcactgtcatcgcctaggctggagtggggtggcacgatcttggctcactgcaacctctgcctcccaggttgaggcagttctcctgcctcagtctcccgagtagctgggattacaggtgcacgtcaccacacccagctaatttttgtatttttagtagagacggggtttcgccatgttgaccaggctggtctcgaactcctgacctcaggtgatcctcccgcctcagcctcccaaaatgctgggattacaggtgtgagccacggcgcatggcctgttgtaaacattttaaagcatgtctttctctttcttttgctttctctctctttctttttcctatcctgtctccttcctttcttcctcctcctcttcctccatattttactgtttttttttttaagtggactcaaactagatatatattattttataactggcttgtccacttaacataacaaaatttttacattatttgatattcttcaatagcatgactgttaacggcagctaatattattcctttgagtggaactatcacaatttctttcaatgatcacctgttacgggacactgctattgtttccaacc

SEQ ID NO: 12722 - DNA, 3405 bp, Homo sapiens
agtcaggaaacaacagaagctggataagatgtggagaaataggaacacttttacattgttggtgggagtgtaaagtagttcaaccactgtggaagacagtgttgtgattcctcaaggatctagaactagaaatagcatttgacccagtgatcccattacggggtatatacccaaagattataaacacacatgcacacgtatgtttattgggcactattcacaatagcaaagacttggatccaactcaaatgtcatcaacgatagagtggattaagaaaatgtggcacatatacaccatggaatactatgcaaccataaaaaaggatgagttcatgtcctttgtggggtcatggatgaagctggaaaccattattctgagcaaagtatcacaaggatagaaaaccaaacaccgcatattctcactcataggtgggaattgaagaatgagaatacctggacacagggcagggaacatcacacacaggggcctgtcatggtgttgggggaggggggaaggatagcattaggagaaatacctaatttaaatgatgagttaatgggtgcagcaatccaacctggcacatgtatatccatgtaacaaacctacacgttgtacacatgtaccctagaacttacagtataatttttttaaaaaaagtaacttccaatatttttactattagcactctccgaagaagtgtttgtggtggcggtggtggtggtggggagggtggcctgtgtgtgtggcgaggagagggggcgggtacagggctggaccttgagatagataaggcaaacaggaaggaaatgtgaacatttcattaatattcatttaaaaaatattcattgaacacttactacgtgtaagcaggcactctactaattaacagccatttcagattttcagagtgcaaagggcctcaagaacaaatgatttatttttttgagacatggtctcgttctgtctcacaccctgcagtgcagtggcattatcaccgctcactgtagcctccaccccctgccccacagctcaagtaattctctcacctcagcttccccagtagctgaaaccacaggcttgggcaaccacgtctggctcatatttttattatttgtagagacgggggtcttgcaacattgcccaggctggtctggatctcctggaaccgcctttgcaaaattataactgaggaaattatggcagtgaaagaaatcagacctaacggattccatcttgcttctaacttttgtttttgagactagtctcgctctgtcgcccagggtggagtgcagtggcgtgatctctgctcactgcaagctccgcctcccgggtttaagccattctcctgcctcaacctcaggagtagatgggactacaggcgcccacccccacgcccggctaattttttgtatttgtagtagagacggggttttagccaggatggtctcgatcccctgacctcgtgatccgcccgccttggcctcccaaagtgctgggattacaggcgtgagccaccggccgcttctaacttttaagctgtccttcttcattcctgagcctaggctgaaccaatttagggaggaattcagtttatggtttgactctgaaacaaaattgataatatccctttcccaaaaagaccgcttttttgcctggggaccagtctgcctttgcagaaccaacagattagctacaagattagaaattacagtttagaggtcatgcagcctctggctccaagtttctgaacctccccaaattgctcctggggataacatcactattgtaaaacctaagataagttcttgagatattttgcagaccctgctctccatggatcagttgaaaccacccagattggtaatttggctcaaccagttctgccatcctacccaggaacagaaaacagcaagaaaaactcacgtctacccactatgagtccatctccaacctgacccatcagcactccctacttcccaagcccctaatcgccgaattatctttaaaaactctgaatactgcttggggagactccattgcaagtcccctgtcttgataaatgggctatcggtcagcagcaggcaaagtgaaccacaatattgggtggttacactcctaggatcaagcaatcctgctgtccggcttcccaaagtgctgggattacaggcgtaagccaccgcgtccagctagaacaaatgatttcttaaaagcaactcagatatttaaatattatttaaaactgtttctagacaaatcggagtgactatgggacaagcatatggtcgcaggactttggacgcaggcagtgaggacacctatgagcgatcagtggggtcctacggcagccgtggaactgctctgccttgcaggcgaaagtgtggtcagctatatcggagcgcgatgggggcctgagaggcgcatctgcgcaggcgcccggctcctaagtctacccaggaactgaccctgctctctcctttccctgttagacatggtaagtgtgagtttagcgctgctgtccggatgggttggtagcagacagggtggagtagggttaagcacactggtcaccttaggattggtttcctggtgctggagaatggttaggacacaggccttggaaggttttttgagtgtgaaatattactcagcgttttctgcagacctcgcgggcaatgccgcttctaattttatccaggccttcttctgtagggagggcctgttaagagttgagcagcccgatttctgaacccctctaaaaagctgtggctgattggtggcttttttttttcttggagagggggtgtcaaagatttctttaaaatcgttagtgatgtggtctcgctttaagatttttaatgggatcagaagaaaattcggtacttaatcacttccggtaatcttcatgacctgttatagtgactgcagtgtactctcaatgaggaagatatagatacgaaaagaactagagccgcatcacatggggacttctgcaaatacagagactcggattaaaggtggagaagatggagctaaaggaactgcttatttaatacatttgaacaacttttggggtacttagaaggtgctttgaaacctgcatttgattaagcaagaattcgcttgcaagttaagggttagatttttttattttttaaaaatatgctttctgccacatgtaaaccgtaagttgtcctgaaatgataagctttgatattctatggtgtttattttttacttatctttttgaatgaaaagtgaacaacaagaaatgctggtggtaattttttgggtcaatgatgagttggcatgtattctgaatctaaagttgattattactactttagctctagaattactctgagacctgaaaattacctgaatcgtgactaagacgaagcctgaat

SEQ ID NO: 12723 - DNA, 3389 bp, Homo sapiens
cagaagctgtggctttcgatattagtgcatccttcattcattcctcagctatttcctggccacctatatgaacagccacgtgccaagtgctatgcagagcatggggacagagtggtgaacgtgacctggatcccttcttgagctgaggcccgtgtcaccctcaaatgggagctctccagtaatggagactgtatctccctctgcccttgacattgactctccagctgctggtgcaagccctgttaccaggagggtgggctctcgttgccacatcccggttttcaacatttccatgtgacaggttccgtgagctctctccttaggctcctttgcctcctgaggcaacagatccctctgactcccagcccctttatttcccggcacctccctgtgtcctttactcaccaagtcctgggcaacccccggcaccaagcctgtacccactgtaggtggtgctttgtatagcccttccctcatgaacttctgttgaaagagctggaagggtggtcttcctccttcagccacgtctgttgagtgagcgagtgaaatggaaggagagaagcaggccccatctgttctccacactcactagtgttaccttccgtgctgctctgtggccacgtgggcactgacctgaggcatcacttggacttctgtgtgctgtatatgtgccaagtactgtgccttgcctttgacatatcatatctcatttaatcaccagacatactcggtgaagtcgctatttttatccttttttttttttgagacggagtcttgctctgtcgtccgggctggaatgcaatggcgcgatctcgactcactgcaacctctgcctcccaggttcaagcgattctcctgcctcagcctcctgagtggctgggattacaggcaggtgccaccacgccccactaatttttctatttttagtagagacaggttttcaccatgttggtcaggctggtctcaaactcccgacctcgtgatctgcccacctcagcctcccaaagtgctgggattacaggcatgacccactgcacccagcttttatccttatttaacagatacagaaatcaaggtttggaaagactgactatcttgcccaaggtcacacagctaatgagtggcaggatcaagattgagccaaacctgcatggcatcaggacgccagctctgaaccaacacctagagcatctcaaagttggtctgggccacctgctttgtttgcctggggtgcttgttaaaaattcagattcaagtacctcattctctcaagtatctcattctcagaggttataattcattagatgtggggtggtgttactaaatctgattttgcaaaagcccctcactctgaagtttgataactgccctgtgtgcctacctcctgcctttttttttttttttttttttttttgagacagagtcttgttctgttgcccagactggagtgcagtggtgctatcttggctcactgctacctccgcctcccaagttcaagtgattctcctgcctcagcctccagagtagctaggattacaggggcgcaccaccacacctggctaatttttgtatttttagtagagatggtgtttcgccacattggccagtctgatctggaactccggaactcctgacctcaggtggcctgcccgcctcagcctcccaaagtgctgggattacaggcgtgagccaccatgcccagccctgcatttaaaaaacaaaacaaaacaaaaaaaacttttttcttgtggtgagctatagcttatatacaaaagtgtgcacaaaacctacatgtacagttcaaagaataattataaagtgagcccccatatgacaaccaccctgagttaagaaggagagcattgccaggcagtgccttaccagcctccctggtctcccaacccagtcatggtcccttccctctcttagaggtaactcttctaaggtaaaagcttgtgatcatcattcccttgcttttctgtagtaacttttccacctatatgtccatcccttggcaatatgagtttagcccatttgtgaatttcctacaaatggacttgcattttcccagctctggtctgtctgcttcttccacattctctttgagatccgtccatgttgacgtgtgtaggggtaggcagtccatttttattgcagctggagccttctttataaagcctgcttcttctgctgatccacatcctttagagtgcctagcacagggctgaaaatgcagcagctgctctgtaaagacctgttgattagattggggggaggaaatccccgagaacgtgcgaggctgctgtcgagagctagcagaaagtgctctgccaggcctggtggccccccaggcattctacttttgtctttctctcctctggatctggctgttgcatttctgtcgtggacaatctgagatgtttccatctccctgtaaaattaattcccatttctgtgtcccttttcagaatgccgaactggggaggaggcaagaaatgtggggtgtgtcagaagacggtttactttgccgaagaggttcagtgcgaaggcaacagcttccataaatcctgcttcctgtgcagtgagtacgccccaggccctattgctgttgccttggacaccctggacgggcctgcccccacaggctgggcctgtcaacaccccagggaactgatcccatgggatgtaaacagcttgacatttggctgaagcgcagctgggcagggaaacacttcagggcctctttgttccgttcagaagcttctttctaagggatgaactggccagagcgggtcggggtggcaggcgttcaggggctgaaagccaagctgtaaagacttggttaagaaaactttccactcagctctctcttctctctctccctgtcatgatttcaccatttcagaggaaaacactttcagccctttgcaccctaattatctcttgttcaaaggcaacagaggccacaacctcatggtgaagctgaatctggaggaagagtggggctcctccttcctcagccccttgcaggctggcctgttcagttcttcacttcccattcccactcagcctgggatgagaggaagagggagtacaaagttccctgatatctactcctaagaagccagagcaaggtttgctccagtcataagcctagatgagtaagaaatcagacaaaagaataccaagcaactgacagaggtcaggtcgacccagggatcctgacaccgtgatgctgcacccactggtacctgggccaggtgatgtttccaggatgtggcaacttggtgaagcctctcctcaggttcctaaatgagttggttcattgtgatcagagcagaaggtctgggttagaagaagaggcaacttcagcaaggtgcattttcttt

SEQ ID NO: 12724 - DNA, 3376 bp, Homo sapiens
cggacctataggaggagctgttttcctccatggagcattgcctgcttgccggggctggctatttttatcccaaatgtggccgagagggggctggggctgggtgacggggcagggcaacgtggctgatgggcctgacctgctcagaaaacccaggctgtgtgagactaagaaggaaaagtgagaggggatcccagttcccaggtctctcctctcttccccttggaatgatggcccccccagaggggatgaggtctggggccaagcctgcttccagtctccccagggtctcagaggtagaacaactttcctggtccatatccagactcctgactcctgatggcgtgtgcagctcctacattaactctttcatgggactcaaactcagatgtttaggctgatagtgtttcttgatcccttcctccccaagggcggggctgcctgtagaacttgtgatgcccactcttgcatcctttaacctctccctgtgctccccaccctcccgtgactcatactcagactgggtggagaccctggctgggggccctggaggagggcttggcatctctaaaatatggatgaggtttttcttcctgagccaggcaccctggactgccatagttggagaaggtcagggatgaaaaggacttctggctttcaggattgcctgacttggtgtaagggcgggatctgagctagcgaagggagaactggtgtgggtgactgggttgtggccagaatctgtaattatagagcttagccagacaggcaattagtatctcttggggctgacaggttggtggggtgtgcctggtaggctaaaggcagagggaaccaaagaggatgaggaggtgaaaggccttccacccagacaaggaaagaggaggtgactgactggcagtttcctttgggccaggctggggagtaaggatgaggctctgccttgtaaggccaggccttgaaccttttaggagaaaggacatgggaaggcggaagcaggcagaggcttgtctcactggtgctccctaagcctgcaccctgtgccatactgactggactaggcttggggtgggagggagggaggggcaaactccccaccagggttgggaagacccctctgccagcccagaagggtggctgacccaggctgaggggaagctgtttagggactgtctgtgcagaaagtgagggccatgcctctaatgtgagctcccctggaggaggtgataatggaagccctagtaatggggggtggggatggcagggaacttataagcctttcgagaagggtggagcctgcccaccctgtttcctgatgccctgccaggtgtttcctggctcatgttccctccaccccaccctttggggaaactgctttctagtaagcacaagcactactcattgccgccagaacacatgagagcctccattgtccctgggatggataccttgagagctgttccccttttttcaatatctggcctcttctcctttccctacaggcatgggcttctgtaaagtctcagccccccatgtcacccaaggcaggggcatgatgggaggtggtggggaagtcccctctttcccaggaacccatcatggcagtaagaggagagactgggagaaggaggctgggggaggggcagggtcagagctggagaagagggtcttcaaaagaggtctcatgaggggagggaagggttatcctcagcttcctgacctcattcgtctgtcacttcttgcagggtctcccatgggattgctgggatcttgctgggtgagatggcagtgtgtgcaaaaaagcgccccccaggtaagacaggcaaggaggggagatcccgggaaccatcaagagtgggtgttgttatggctcagggagcaaaaggaaaagggacaactggtatgggtctgagggagggtagcttacagcagcccctacccagcttgggggcagcctaggaaaccgaattcttccgcttgatcccaaagctgggttatctgccaggacagcgcagagcaccagccccacgccccgaaacacctgcagtcttatcttcgggcacctgcagctcctgctttctggcctagggagctgtgttctcatctctgcttggtcctctcaccccttccctgctcccctcgtttttccatctaccggttctcctggtttttccgcgggcgggggtgtgtgtgtgtgaaagcggttgcccccgacaacgccggcagtccgctcacccgcattggcccggcccgggggtgggaggggaggcggggctcgcgcgcgagctttcgcctacgcggcgcgctggcaggctgcggctcctgcagtcggggagcgggcgggggcggaaccctgggcgtgctcggcgtgtccggggccactcagcgcacgctggcatccgccggggggcatggggggcggcggcggcggcgcagctgagctcgcggtgtccccgagcgccggcggccgggaggatggcctgggctgcgggtggggcgcgcgcccgacggctggggctcccctctgagcggctgcggctcctgcacctccccggggagccgccccgtcgatgccactaaggccaaggacatatagacggtctgccctcccccactcaaaccgggatcatgacggtccccaaggagatgcccgagaagtgggcccgggcccaggcgcctccctcttggagccgaaagaagccctcttgggggacaggtaacgggaggcagcgcctggcagctctcccgcacccattatttcccccctccaatccctacattcacttgtccccagcctccccctacctgccttgatcctctttccagacccagagatcctggctccgaaggatccagtccctaccttcttcgtttgcatggtctttggtgattgcgcaggggacttggcccaagagagcccctctagggaagtttatgggagtgaagtggcttggtaggcagggggcactgtggcctgggttttgttactgcagtgtgctctgcaggggtcctggggtgtgtagaaagggttctggaatgctgtctttggctcccggacaggcttaaggcattaggtttgctgcctaaccaagttacccctttttgcagcatgaggtcatggtgacccccggggagacgggctggggaatctattataggacagctccttgttctgggacatgaatttgatgcctgcagtcccagacctgcagaggtttcagataggtttagctagataggtgtcactaactgagtgacagatgagccctttaaagctaaatgtgtgcagatggtacaaggaaggtccagttagagagcaactgtttcaattacatttcattcctccctcctctatctctatctcagtctgcatgaccca

SEQ ID NO: 12725 - DNA, 3343 bp, Homo sapiens
ccactctgccactgtcaacatacagtccctccagagaagtacccctcatgttacaaatggggcacgttcaccagactcagcttcaggacaagaccccaggtcattcccaactgaggctccgaggtgcaggagctccgtcctgtctgtaaaactccctcagttttcggctctgggtttggtgggggttgttcctcccacctccaacctagaaagagaagccagaggaagggaggtcacatggtctgccccccaacctctcagcagagatgcaaagctacctgtccaggatggcggactccagatgggccccgccctgtggtgcagaagtgagatttgctgctcctcctgcgtctgcccctctcctgccctcctctccctcccctatctggctgtcatggtagaagccactgctggccaggccactgaagtactaagtggcccaagtgttgaggaaggatggggactgggtcctgagggcccatccgacctccagttgagagcccctcccctgacctccagctgcccggccaccccagccggtccctgggaactgaggtggcagctgagctccccattatctttccccacagctccccacctgtggagggagaggttgagatattggagtccacgggtggtgcccccactcagtgattccctttgcctgctgagcccctggagctggggtttcttcctcccttgccttggctggccacctggcttctgggaccgccacctggggcacccttctgctttaaggcccaatatgggaggggtcgtccctaccagcccctcccttgtgcccattccactcccgcctggctgccgtctccagctggtcccggctgcctgcccggtcacccgatccgccctctaaactttacggcacggcgggcggtgcgtggggcggtggctggcctggtgggggcgggggctgcttcttaaaggagccgtcagagggtccccagcggccccagggtgggaaggggccagagtggagagatgctgctgcggaagtcctcggtggagtgtgagaaggcagccagtgttggcctggaagacctctagaacctgagaagaggcagcggcaagtgtcagcggagggaaggagggaggtgggggtcctggcctgggatggggccaggagctgggcaggagtgtgggtggaggggcctggaacctgcctcagcagctgctccacttgcttaatcccacctggaaccttgtcccactccctgggctcctgtgtccagcacctgcccagctgacccctgggaaggagggtgggcatagcagccaggtctttgccccagctgagggccagggggaggtgtctggctcctagagtgaaggggctcaaagatggggaagaactcaaggggtgagagaagtgaagggagaggctcagagaggctgtggaggcgttgagagggaaggccagctcagcgaggccaggaggctggggtgcaaatgaagggctgcctcaccttgcccctctttgattcctcaggggtgtggagagagagccctcaagctcaaatgcagaggctgcttcagctgggttgggagcagtccccaagtcagaggctgaggcttctgcccaggtcttgggtctcctgggtagcacttctccctctgaggaatggagtgattgatgctgcagttggatttgctcacttgcatgcccagagacatgtctattcttatgggtgcacacgtttgcacatgcacaaatgtgcaacacatctgtgtgcaaaatatgcacatatcacacatatgtactgcatggattgcacagtgccacatgtgtgtgcacaccaacccatatccacacatgtgcaatatgacacactatatatttgcacatagatgtgcacacacatgcacatacacactacacacatgcgcacatcacaaggggacactcggaaacacattcacaggcacccacacccttggctccagcctcaaaagtgtctctgtgtttttctgcgggactgtggggacactgccacctccagaggcctgaccccctcctgtcactctcactcttttgactggcttgttttgctcattgcacttggcaccctctgcatccatctgattccttgttggcactctgtcccctttcacatggggaccttgtctatgtctcccagtatccctcctcccaggtctaggctggcatgaagtgggtggcacattgtgaattaatgtctgtgagtgtgtatacaagagaggagattactgggaagggtgacgtggtgaggcgggcttgccagtgcagggtgaccctgagggtgtgcccagtggcgtgggtgtgtctgtgattgtggccaggcggggcaccctcggaggggagggttcggaagtggaatgcgaccccccagcctctttcccctaggggctgtaatctgatccctggggactccccccctagcctcccgccctcgccctcactgctgactcctcttccagatcctggggcagagtccagggcagctcaaggctcctccacacacacacccgctgaaccctgagcaccctgagctgctgagatggggcgggccggggctgccgccgtgatcccgggcctggccctgctctgggcagtggggctggggagtgccgcccccagcccccacgccttcggctctccttccaaggtaggtgcacctggcaggcgggagggcccagcttgaggtgggcaggaaagggtccccgtatggccagggggctctgtgttggctgttgccccatgtgcgtgcctgtcaccagactctggtaggattagtgggcactctcaggccacctccagttaaccctgtccgggcctcagcccccagcctctgcccacattctcttcgtgctttctcaggaagacccctcctgtccccacagcaacagaccttgtctctgttccgttcagtacccccaacaaggcgatactccttcagcagagcaacagggaagtcagagcccccttctcatgcctcctgtataggagggtggcccctgggcagtggcagtgaataggcagttctgctgagctcaggctggtggtggagtggcaggaaaggaactctcagcctgacttttgggagttggggttctggccatccctgcatgccagtctcccccaggactctggtgtccataagccttgcctcccagtgcgcccgcctggagacaccacctgtctgagcatgcccaagttcaacctgccttcctcttcctggggggatgtaccacctaccctggcagctccacacgtgcacctgggtgggcttgggtttgcgtgtgtaaactcacacacatgtaaactcacatgtgtacaggccag

SEQ ID NO: 12726 - DNA, 3316 bp, Homo sapiens
aggacaaggaggaactggagtctacaataagtttcccaggcagggagttgagctggcaaagtaagtcacaggctgcctgggagaagtattgatgtgagggggccaggcatggtggctcatgcctgtaatcccagcactttgggaggctgaggcgggtggatcacctgaggttgggagttcgagaccagcctgaccaacatggagaaaccccatctctactaaaaacacaaaattagccaggtgtggtggtgcacacctgtaatcccagctactcaggaggctgaggcaggagaatcacttgaacccaggaggcggaggttgcagtgagccgagattgcgccattggactcaagcctgggcaacaagagtgaaactccatctcaaaaaaagaaaaaaaaaggaaagaaatattgctgtgaggggactagcacaatgatgccttgggccaaggctttggttgggtgagctgggacccctaaacataaaccctggccccagccagggggaacctgagcctggagcagtcctgggaagccagaggtgggctccaggtgtgggactgggtacaggtggggacaaggagccattcacgggctgcagagagagtctgagaggctcgtgaagcaactaacctttcctggcatgagggtggcaggaggtgtggccagattccagagggctttcccatcagggattaggacactgccctcgccaggccctggctcacctgtgcacagcattttatcggaagcacggaccttgccccaacacattcctgagataacactcccccgcccgtctcagaagacactcagtccgttggtgtgagggaggctgctgacaccccccagattcatttccagtttgtttgacgttggcatgtatgtctgtgtaacatgactgaagaacgagtcattagtgagctgtccaaagtccctttgggaacattccaggaaaataaaccaatattccatcaaagccacaaataactttttttttttttttccattccttcaaagcaggctttctcagagtgtggtccacagacttcctgctttagactccccagaggagcttgtaaaatgcagattcctgggccgccaccctaagcctactgaatcagaatcccagtggggcttctgggaactgcatttttatatgctacccagatgattctaatacaccttaatctcgaaaacctctcactctctttgcccctttgcttgatcgttcctttgtgtcaacaccgtgtgcccgctgcgctctgatactacctccctgtgctgccccacctggtgaacttcagctgaagggccacctctccctgggagccttccttgccatctttgtcccatcttgtgtaggggcccactgtgttttctcctaatatgaatctaccacaaagtagtagtttctttctgcctgactgctcccctgaatggggaagcatcctgcccagtctctccaggcccagcagaaagttttgcctataattggtactaagaaaggaatcagtgcaagtgaagggtgctgagcggcaacggaagggctacagagtaggggtgacgaatggtcgcttcccgttaagaagctgtcaccttctgactcctctcctggtgagtctgaactcctaggtcaagtctggggccagagggcgagcatcagacccaagaagaggccaaggctctggctggcaggaggcacagcccacctgtttgggactgcggtgtccctggtgtaagctcagatccctgtctgtatttcagggagactccatagcttgacattcttcctgctacagaaaaacagatgaaagaacagttttccagtcccagggctgaccccaaacccaggacagctagaatgctcaggcctcccccctcttttcaggcaggagaagctgaagaatagaactattggaccatgaaactcccaagagtccttccccctcagcgtttctcagaatttgcgaccacgattttctctgtgaggctcgcaattgctatttgccaaactggtaactgttgacccaacagaaatcaaacaaagataccagcagccccagacaggctgtcttcatcgcatcagtgaagggagagcaggtgcctgggatcgaaaggacattgtccatcacctggctctgaaaaacaaaatgcatttccttattcttaacaagctgagcaccagaaacctgctttaccagtccagggtgcctcctggaagctggctcgcttatctgcatgtatgtgagggctgggggtgtttttgtggggctggctccgggcagggtggctttggaaaggagaggcctgacctagcgagactctagggtcagcccagactgctgtgacctcaggggactcagcccaggaggtccaggtgagggcagcctgccctctacgtctgcagtaggtgaagaaccccttggttacttgaagagaaagaaaggactggctgggttgtaggcagcagggccgagcagctgagggctaagtgcacagcaggccctagcaaatgcttctggaattgaattggtccaaggggagactccagctttagttcaacatgggctgtatccgaatccttctgaaatttgctgggattccatgagggagtcaggtattacaaggttttggcaattactgagtttcttttgtgcttttttctttatgagaatgttgtttctgaacccattccctttctcttcccttctcaccaaattacacttgatttgcctccaggaagaaaatagtacattgttatcatttggtcaagatttcatattcaaaaaagagtaaagtgacaatatagttcaaaaatcttgttagatgctgtggaaacctcacccggcagtagtgatagctgccacgtactgagggattttatagacatttacattttcacttgtcctcaccttccagatgaggcagctgtggcccagagaggttagggaacttaccgaggtcacacagcaagttggcaagagggttggggtttcagtctgggctctctgacttcgcagccaagtgcctgccagtgctgcattgtctcaaggtatttggcgtgttgatgtgacatcactcaccctccttgagttctctgacatttctcagagcgtttgtctgtgtgtcctgatttgagaattagttaagctctcgcactctccggggtgcagtgcctggaattcaggcactggaggaagtcctgcctccttcctggagctcgcagccagatcccacagatcctgctctgttggacagtgaggatgggaggtgtggcccaggggttggcaggatggtagtggggtgcagagtag

SEQ ID NO: 12727 - DNA, 3257 bp, Homo sapiens
gatggatggtgggtcatttagaaagagattaggaggaggtgggtttgacaaataaacttgagtcatgttaggcagatagggaagtcatacctggttcccagggaagactgacacatgacgggccctggctggaggagccacagggcgaggaaaggacagacaccatggccaaggggcccccagaccctaccgctatgtcccattgatgtgggggtcaagggagatgagcttcctctcgtggaaagaccatagatttaggtatcaagcagcctcataacaacctcaaacactggagacgtcacattatttttacaaatgagaaactgagatcacagaggtcgtcgcttgtccaaggtcctacagttgatcagacccaagtatggacattccagcccagcattgagttcagcctgtgcatgtcagaaagcagcactggtcctgctatagattgagagatggggcttgtcatgggagttacataaggagaggcagggaaaccccccttcatgacgcatcccccataagccaggcacatgctggggaaatggttggttttagggagagtcacaggctctcctgggacaggtatcgttcagtttttccttacaacaaccactatgaggtctttttaaaaattattattactattttctctactttactgatgaagaagcggaggctcagagaagctaagtaatgtaccaaagatcacacagctggtaagtgctgtcattcgggtttgaacccagctctcctcatctctaagtcctcagttcctttttctataacaccacaggctgagcaaaggcaagaattccaggtagaaaatctgcttacccctcttgctcccacagtgacaacaaacatggtgcttcattgggcctcaggttactcatctgtaaaatgggaataaccattatgcctatcctttaggattcaatgggattacgactataacatagctttgtgcacagtattcaagaaatgagagctattattcccagatggttgttttcattttacagattagagggcatgtaagattcccttcatttccatagactctaaagagcaaaggctgaagtctggattcaaagcaatacataagaaattccaaagttcacttgagcttcttcttcatttcagtctgagataagaaaaaggaagatggcatttcaggcaggtggaatgagtaggcaaagacatgagatgggattagacctgtgcaaatagggttggtatggggaagcacgatgacatcagattttagccacttttgggagtggcatcttaaatgccaaggtgagctatcagggcttcaatccaacgttcaggctcaatgtcaggggagcctgccacatgccagagtctgtgcctggcagagctgagccctggcacacgcactgtttacagctgcctggtatggcagtggtgatatcacccttagagactttgccctcttctctctgacccaaccttcaaccactggggcagtaggttatgcattgcctagaaggcaactgtaagattcaggggctgctatggatgcattacccaggagataagggcaacctcaggtgggccggggccctcacagcaaccttacgagaggggttgtatcatgcccatttgatggaagagaaaactaagattccattagaattgatgtgacgtatcctaaatcacacagctgcagcaggactaggatttgaatgcgggtcaatctgcctccaacactactgccttttcctccatgctggattaggctattggcttctgaaagcacagacaggtgagatgggtcaaacatggcctgaagcacccaggcacaggtgggagatggcaagcagaggcaggttcaaaacgtggggccaggactggtctgaaagatagtcgttaaatagcactgaggagagggagtgagagagatgtgggtcttgggggagtggggtcttgagaaccctgaaatcagcagtgtctgcccactttgccctggaccagcctctctgtctgtatccttcccccagagaaaggaccatgggctgacctgggccaaggacacctggctggagccccttctctgacattaactagctccgtgacctggggaaagccaccctccctcctgagcctcacttttcctgtctgtaaaatggcctccccgtcatcacacccacacaggtgtcttgaggagtgaatgatggtgtgctccaaggcccccatggagagcccggcacatggcaggcactcggtgttcaagcactgtgttcccatagactctgggctcctgccctcctcgcccccaacccccttcctaggaaccagccccggcttgtcagagagccagctagctgtcaaccccaccccagctggccagttaatgagtgaccaggactcctgagcctgacctataaggaggtgctaggcagggacacagatgggagacggtggacagcggcagggggaacccagggagcgcgatgggctgcagggctgcatcagggctcctgccaggagtggccgtggtcctcctgctgctgctgcagagcacacagtcagtctacatccaggtgagtcccttggccagcgttccctttgcctgaagggccccatggtgggaggctaggctggagagggtgtactgggaattcagaggggcaccgggggagcacggggcccggggctcagcccaacacccatcacagcccagagaccaaggcagctggtgggtgggggcagccagatgttgatggcagtgatgatggcaatgacaacaccaaactgattcagcgctgctcccctcaaaggcccgtgctggtcacagaggtcagggtgtggaacagaaggctcctccttgcatgggaggaggccagaaagggaaggagacaccctgttatgctcccacagttccgtatattcacccacatgtaggtggaggaggacaggctccagaaaaattttcctgagaagtaacccttgagctggcattgcaagatgaacaggaggttgccagacacagatgatggggaaactgttccaggccaaggggcacagcatgtgcaaagaccagatagaagactatgggggttccagtgcccttccagggggcatgggagagtggcagtagtcgtcacagcagggcctgtctgccacgtcacaggggatgctgctggcctcgcccagcatagcagagacgtctgtggccctgggtgtcacatccctgactctgggcatggtctccttgggaagaacaaagt

SEQ ID NO: 12728 - DNA, 3251 bp, Homo sapiens
agtttgagaccagcctgatcaacatggagaaaccccatctctactaaaaacacaaaattagccaggcgtggtggcgcatgcctgtaatgccagctactagcggggctgaggcaggagaatcacttgaacccaggaagcggaggttacagtgagctgagattgcgccattggactccagcctgggcaacaagagcgaaactccgttttaaaagaaaaaaaagaaaagtacgttaaaataaatgcagcaaacacttattgagtacctactgtgtgtcaggcctatgatagactccaggagttgatggaggcaaaagaacagatcccatccctcatggagctggtaactggatagatggttcactcgtgtgtcttgcgctggcactacctgcatgaggctccgctggcctacctggaggtcaaaggatcccatgggcctttccaagttgcagctctgaacacacaactcttccctcctcccacagccactgcccttgctcactctctcagaccctcaagctcagccctgccaccaacaaccttgctctcaggccttcgcacggcaggcacctctgctagaacttgcttcctctcctgccggcttcactgctcgtggcttagtcaaagcctccttttggttcaaacttcaatcctggagtcccctccccacgctaggacctgcccctttgcttcagtctttgtgccctgtgcgaccacacatgcacagggcgtctgaggagtttttgcttgacgtctattcctgcagttcatgagggaacctcatagctgaagcagagggatgtgggagacccagtcactcctcttcctcagctttcgtttgctcacctataaaagggtacagtgaccctgaactcaaaggagagtgctcaggtggccagaagcagatgtcacgtgggccactgggaccctagaggcactgctgatccccaggtgcttcctggaggaaggggccacccggggcccgcagagaagggtgggaagggtgacaggaaggcaaggaagggcatgtgcccagtggtcctcgtctgtcttggctggagccagtatgaggagcacccactggaaggtcaggttggagtccgatggcaggggcctccagggagagccagtgtcacttcgggatgctccttagcatcctggggctgtacagggagagtggctgcagagcccttccaggcagggatcctggcctgagtgggggcagctcttggtcggacctgtgtggtatttcttcttcttcttcttttttgtttttttgagactcattcttgtcacccaggctggagtgcagtggcgtgatctcggctcactgcaacctccgcctcccgggttcaagggattctcctgcctcagcctcctgagtagctgggattataggcacccggcaccacgccaggctaatttttgtacttttagtagagacggagtttcgccatgttggccaggctggtctcgaactcctgacctcaggtgatctgccccctcggcctcccaaagtgctgggattacaggcatgagccaccgcgcctggccggtatttcttctttcattctccgtgtaaatggtggaaggatcggctctctcctccccgcctcccaggtgcagagagagagagagagagagagggacaggagaaggctggggttcggggttctcacagcgtttccctctcatgctgccagggcggggcagtggaaaatggtccctgagggcccgttcattcaaataaggacaagaataatggcacactccccatctccatttaaaaatagtcacattagctgacactggcttggcacttcctagatgccgggtgcgttccgagttctctacgctgttaaccttggatcttcataacagccggaggagacaagcgctactattttcctttccattttatagatgaggacactgaggcagagaaattgagtcacttgcccagggtcacacagccatggcaaggccaggattctggagctctgtacctggcttcacaccacaagctcaggccaccctcccggggcataccgagtctcccagaacgtggacgatcgcccagggcaacgcagtggagtgcgagcccggtctggtttgcacctggctgctccaggagccctgggcctcatcctaggagcctggcggaagaggcgagcggtggagtttggaggctgctgtgaaggaaaggactaggcgggtcgggtcgggtctgtcctgctcttcttccgcaggcaggaggcgcccagggcgggctgccgcacctggcaacgaacgttcgccgcgcggcatgagggtgtgcgcgcgcgctcggcgagcccgggttctttgtgtgtccgagcccatgcgcgcgtgcgtgtttgcgtgtatgtgtgtgcatgtgtatgtgtgcgcgcgtgtgtccgcacttggggcggggctggaagccccggccccgccccggccccgcccccggcccggccgagctggtatttttccacccagcaggatgggtgatgctgagagctgcctgctcagacaacagacacgcgaggtcaggaagaagccgcttataaattaccgcttccttcgcgccgccgccaacgccgagccccgaggaccgcaagcccagaggacaagctgcgccaagagggagtgctggagctgttcacccagcgggtcagagagcgagccgggcaggccagcccccggccggcggaaccctggcacagcctgagcagatgctgcgggcggcgccgcagccaccccaggtaccggagggaccgggagctgggcgcgcagccggcgctgcccgccgtctgcagcccctccccatccccgcgtcgccgcagtcccggcctcctcccctccgcgtgcgcccatccggcgcccctttcaccaccgcggaagggaccgagagtcgcctgctcagtcccgctggcggggctgttattgtttccccggcaaaagggctccggctcttggtgcgggcggcaggagagtgtgtgtgtgtgtgtgtgtgtgtgtgtgtgtgtgtgtgtgtgtgtggcatatctgtgtgcctgtctccgtcaggatgcctacatgtgcctccgtatccctgtgtctgtgtttctgagggtgactgtttcaccgtgtccccagcagcgtgcacatgtgtgttccggtgcatgtctgttattctctgcgtgctgggctgtgtgtgtgtgcctctctgtgtgtgatacctgagtgtgctgtctttggatgtgtgctcttgt

SEQ ID NO: 12729 - DNA, 3225 bp, Homo sapiens
gcctagacaaccttgtccttcctgaagacacaagacaccgatgcccccacccccacccagcctgagcacagagctgaagggagggcctggggtcaggcagatggatcaggcgcctctgacaggaaactcccgggcttttggaaggacgcatcgaccccgcaatcgaactgagttcctggcaggcgccagtgtccaatagacatcgacagcgggaggacccagcaggcagagcggggtgtggccatctgggcctgggaaccctccggaaggagaatccacctggttctgtttcaggccctgcccacctgggacaagcctctggccctctctaggcctgttctcctgtcaagaggcctccccacctgctggggattctgtcaactctgaagtcctgtatggtggtggcggtagggattgcagctagacttctccctcccctgagcctaggggaggcaacggcccctgcgaggcccagagggcagctcccagggttcagaggtgcagggatcagaggatggggtggggagaaggctggaagaggaagcaggacagatgccacaaagttccctgctcagtggtcttgtataatggcttggccaggccatctgggttgaaactgcttacttagtggtgtgtggtctagaacaagttacttagcctctctgtgtctcagctgtcccatttcctttttttttttttttttttttggacacagggtctctctctgtcacccaggctagagtgcagtagtacgatcatagctcactgcagcctcgaactcctgggctcaagtgatcctctcacctcaggctcctacttagtagctgggactaccagcatgtgccaccatgcccagctaagttttacatttttttgtagagatggcgtctcactatgttccctaagctggtctccaactcctggcctcaagcagtcttcccaccttagcatctcaaagcactggaattataggtgtgattacaggtgtgagccactgcacctggctgtcgtcctgtattttatctggcaactccactttggtgccatgtgtggcctggcatgatcaagtgtgtgtagctgtgtaggtctggccctgtgtaataccaaggtggagtgtttctgtatgggactgtgacaggacattaggagaagtgcaggtgggggtgaccctgacctgcactgactttgaggctgcgcactacagtgtggctccctgaggctccagcagctccctaagggcaggtgtgagctgtttgctcagtgaggcccagcaaggtatgagacccaccctgggcaaacacttagatccggctccaggtgggactgggatggaacacctatcgccactgtgaaggacacatccctctcaaggccgagccagccctgggggcctcagagttcttggtgctgaaccttttttttcctttttttttttaactggagacagagtcttgctctgtcacccaggctggagtgctgtggcaacatctcagctcactgcagccttgatctcccgggctcaagccatcctcttgcctcagccttctgactagctgagacctcaggtgtgcaccaccacgcccagctaatttttaaatttttagtagagacggggtttcaccatgttacccagccaggtcttgagctcttagcctcatgcagtctgcctgctttggcttctctaagtgctgggattacaggtgtgagccaccgcgcccggcctgctgcaccctgagggtctctggaactcctcctccatgtcactgcttcctggtgacatcacacaggtcactgcctaatcttctagaacagtgccaggacactgccttgttgccctgcacaacctgtgaatttgctccatcaaaactggcaggcagggttacccctgaggagggggtgggggagaaggggtaggggtgggaccctatcatctcccagaggggagatcaaggcagccatcatctgtcgaactagatggtgagtaggggtgggcatcctggagcaaggctagactttcaggcccctcactgtccaggacactgggcaggttgggggccaccgagggaggctgactcttgaggctgagagagggcagtgaccgtgttaaggtcaccggcaggcaagtggaaggtgtggtatgtaatacggggtgggaggaacaggaccctcaggttaggagctgagaggcccaggttcttattccctttttttttttttttttttttttttttgagacagagcctcgccctgtcacccaggctggagtgcagtggcccaatctctgctcactgcaacctccgcctcccaggttcaagcgattttcctgcctcagcctcccgagtaggctcccaggtgcgtgccaccacacctggctaattgttgtatttttagtagagatggggtttcaccatgttggccaggctggtcttgaactcctgacctcaggtgatccacccgtatcggcctcccaaagtgctgggattacaggtgttagccaccacacccggcccctaggttcttatttctgctttgtccctgctagtaggatctttgtttctctatctgtacagggagggggtggggccagatgcccttagtctgaggggtctttagttctgctgtggggagttgaggggagtgttagggaccaggtcatggggtggctggctccaggcaggtgccctgacccctcccccaacagccatcagggggtagtgaacaaaaagtctggtgtgactctttccaagtgctcccttccccggttgcaggagtctagatcaatcctgagttactggagtccccttagggcttctgacttgctgtgtgatgcaggggtgccccgtgccccccacaacctcagctgctctgtctgcgaggggcacgtgtgagatccaggcctgcccagtgccctgtgtaatgatgcctcacattcccacgccgcttctcagtttgtcaagcgccttctcgtacacagtctcaccttctatgcccactctggctcctgctccgtgatgccccattctggaactgggacccagagagcagccagacctggactctggcctcggggctcagagagacatctcaattcacttcctgtggaggggaccatatctggggcaggggactgcagtgggcagagcaggggtcatgctttgccaaagctgtttccattgtttgatcttccatgagaatcaaaacttgccaaaccatcatgtaaagatg

SEQ ID NO: 12730 - DNA, 3142 bp, Homo sapiens
cagggacaacaaagagaccaatctgagtgcaaaacttggagggcttggtgacctggtgaaaatatttgtaaggttaccataaatgccatgttcaaaagattgttatctgtaattttatacgcctcctccagtactgaccttctttctaacaaatctttagaagagaaggacaaatgttaagagttaaatgatggcaatataccccatcctgaaattgacccaggagcaatctatccctggaaatacatgtttaaacaatagatgtccccagacaaaccaagggaagccttggactggtatgggagctatgttatgacttgcattccttcaacagggaaggactaatggttttagttaggtgtcttagcagtttagtcagagtttacttgggggtgtgatgtcagcttgcgcctcagctgtgggatgacatgtgaaggagtggtagagcatttggggtcaacttgggccttcttttatctgtgtcacaggtaaaatgaggaaaataaaaccaaccattgagttgtaggagttgcatgtaataaataatataaagaaatatttatttatttgagacggagtctcgctctgtggcccaggctggagtgtagtggcacaatgtcagctcactgcaacctctgcctcccgggtccaagtgattctcctgccccagcctcccaagtagctgtgattacaggtgcacaccaccacgcccggctaattttttgtatttttagtagacagagggtttcaccatgttggccaggctggtctcgaactcctgacctcaagtgatccacccaccttggcctcccaaagtgctgggattacaggtgggaaccaccacacctggcccagaatataaagacacttttgtaatgtgcaatgaaaaatatgtaaataaaatatttttatctgtatatgtttttatagaggctattccctttgctctaaatcctcacacttcttgtttgtgaagctccatctaaaggtaatctctcagccgggatcctaatttttctccttccttatcagcgaagcctgcatcctcccctcccaccttgagtcattagtttcccgtctttctccatgggtttctgtccctctgccactcatgtttagcaacctcctcactccaactctaccatcctattcttttttattcaatccttgaaataatgcatgtgaaagctcagatatcatgaatgattcctcatagcctatgtgataaaattcctacatcagccctaaaatctagcctcaactccctgaacaattttttcttcccctatttttttgctcatgcaacaggtgtctttattgttcctgacacatttcccacagtcctcccccagccctttgctcccgccatttttcctgcctggagtgccctttgccatctttccttgactagacagttacgtcttcttgcctcctcgaagctgtcagctgcctgcactcgtggtgtctgtagcattcgtgaatgcatgtggtcttgtattgctagtttctttaatgttatgcttcaaggcctaactaaatcataaacccattctggaaagagcatatgtgttttagctcacatcttcccagtactgagccaacacagaactcagtcaaaatgtcttccactcctgaggcagtcatagcctgaaacacatacatgatattacatttgggccattaaaggactctaacttgaacaaaagtaaataaggaagcagtaagtatacaacaaatagatttatcaagaaaatgaaatagctatagcaagggtccatcctcaaagaacaatctgctctattaaaaagtgctcggccatgtgacttaaaagttgtgaacaagacaatattttcttattcatcaggtctcgaacaggtagaacaatgtgtgtaaaactaaagattatcctgcttaaaaattttgttttattttataaagttaaaattaaatgcagccagtggaagtatcagaatggacagggaatagcaactcttacttcttcccccttgttagacatccttcttttttcctaaaggaagaagatcctaacagtgcaatggataaagagagacgaaagtctttactaaaaccaaaattattgagactgcagagagacattgaaaaagcctcaaaagacaaggaaggtgtgtaaccatctctttgaatggccagaaaagggaccatatgatgctcagaggtttcattcagagttaggattgatctgcttttgctatttggcaggggtcttctcatttaaagaaccatatatcaaacttcagttgtgtgaacaaaaaaaaaaaaagtagaagaaaaaagaaagccaaaaaaaaaaaaaaaaggaaaatcacattttggtctatttatgaaacctatataagtattatactactattttcagaaatgtagcattttaactgtgtttctgaaattggctagaatgagagataatgtgtttggtttaaaacatggtcaaccaactgtgcatgagagttttggatgagttttttggtttgtttcttttgacttttgaaacaatgtaaaaacctttcaaattaaattctgtacgtagaagttaggcatgtcagactgtgaagcagctctaaagcaacaaggatgacaaaaacgactccacatttgtgactctgatgtctacctagtaacttgttttatatggaccacgataactcattgcaatggaatactagagagcaaattcaagatagaaaacatttagtgatgtgaataccataacgaggaagaagccaacgttgggtaactgttagcaattgctagaatgggtcgactgaaagaatttcaaaatctcatctggaaaaataacaatcaagatgctttaagcaccagcacttctcaaatttcattaagtgaagagaaaggtaaacagttcatttatcattcagtcaaatttattaagaactacctgcagagactccctcagccatttaagaaaccctactggtggctgggtgctgtggctcacgcctataatcctaacactttgggaagccaaggcgggtggatcacaaggtcaggcgctggagaccagtttggccaacatgatgaaactgtgtctctactaaaaatacgaaaattagccggacatggtggcatacacctgtaatcc

SEQ ID NO: 12731 - DNA, 3142 bp, Homo sapiens
aaagcaggtaggataggagtgggtgggatgggggtggaggctgcccaagtgattcagggaagagatgatggggatggatgaggctccgtctctgaaacaattcagatatgggagagcctgaagtcagcggtgtgactgaagcacgtggggtcatggacacccctcagtccggaggctggggctgggctgggactcagctgactttgtgggggcagccaacccagtcactgggtccttttctccccggctcaccctcaagcctctccagctgcatggaggctccagggctaggctctggctgatcggaaggggtttatggcaggaggtgacgccatgggagacttgtcacttgggcacagccagcaccatctgctggggcatctgctttcggaggtggtgactgctaattacctggggccaggaagaggcctgggaacccccatcccccacaccacccagcgggtacaggggctaggggtggggcccctggggccctaagagcaaatgggctacagcgtccttagcggggggagagggtctgacagtggggccagacatttatccagtgaattttttcagagcacctactatgtcccaaaacctgttccaggtctgaatgacaccaggtcgctgctgtcttgcggctgacattcaggtagaggtaaggagaggggctccaagggcacttaaagaatttaaaatgccatctcaggcgtgaacataactccgaggggggcagtttagccacggtggtggcggtggtggtcgtggtggtcgcagagaccctgcttaggagggcacgggaagacagcgcagccacgggcagagccgcctccgtccacgcttccggaggacgtggcgggcagggggctcacaccctgctcaggcgacccttggccacttccgggcccctcgcccctcaccctcggctgccggcgcgcattcctgccgcccccgctcgtgcgaggggcgggcccgggcccgtgggaagggccggggatgggggccgtgtgccggggaggcggggtggggagggcgcacagctgggccgcatctggcccgagcgcaaggagaccaaatgggacagaaggcggcctttcatccggcgagggaagtggcggccttcgtttctcctcgccatggggcgcctgaggatttcggggagccaaccctcccgacggagggccaggatcgaggaaatcagccagggaggaaggagtggaatttggttctggtgctttctcgttagaacctcgtgtccccacctgcggcacaggtggccaagctcttgctctgtacaaataacggctcccctgaaccgagcgctcgggaagacccaggcgccaccccagtttgcaaggcctgccgcgtcccaaggggaggaagccgtgctcaggaggggaagcgcacagcgaggaagtaggatgtcccccgcggtgcgtcggagcccagagcccgggtctcagcaccctgcccgctgcgccgagggcgcgcccctcccgtgccgggacgcccggtgcatccccggacggcgctggccaggctgggtttcctcttcagggacaccggcgcgggccgggcccgtccccaagcccctcggcggcccgcaggggctacccggggcggggggggtgcggggcgtgcacgtgcgcgccgggggcggggccgctgcgccctctgggcagttcccagcccccagccgcggccccacgtgggtctgcgggcgtggagcggcgaccggcgcgaggccccgcccccgagcccgggagccaatgagcgcacgggggcgggaccggggcggggaggtttaagagcgcgggacactggtgctgcgctgctggactgcgccgccggagcgacgggcttcgggtcggtgcaaggcaggcgcacggggaagggcgcgccgcgcggccgccaccccaccatgctcaagcgctgcggccggcgcctgctgctggcgctggcgggcgcgctgctcgcctgcctgctggtgctcaccgccgacccgccgccgcctccactgcccgccgagcgcggccggcgcgcgctgcgcagcctggcgggccccgcgggggctgccccggcgcccgggctgggggcggcggcggcggcgcccggggcgctggtccgcgacgtgcacagtctgtccgagtacttcagcctgctcacccgcgcgcgcagagatgcgggcccgccgcccggggctgccccccgccccgccgacggccacccgcgccccctggccgagccgctcgcgccccgagacgtcttcatcgctgtcaagaccaccaaaaagttccaccgcgcgcgcctcgacctgctgctggagacctggatctcgcgccacaaggagatggtgagccccccgcggcctggactggcgggcgagcggggcggggacccaccatctggtccagctggtggcagtgtcccatgggagtcaggctgcatccccatccagccactagggccatctgtgggcgacgccagtgcaccccggtgcacccagtttgcctgctggggccactctcccgttacagttgtgttactgtccccggggccccgcctcctgtccagctccagagtcctggatggctgcaggaccctacaccagtctccagtgcttggggttggtgccctgtgatacttctcaccccgtaaacattggagcgcattcatagggcattatgtcctcaaacttccacaagcaaattctgttcggacccaccctcagctcagaccccttcctggggagaaaggctcttcctttagagaagtgaggggttctgacctctgggccctttcctcatcacagtgttaaggtacggggagggagggaagtcattgctggttggtgggtcctggggagtacatctcaaagaactccaggttttggggtctgtgtggggaccctccccgcacagtgcagtagtctctgaggcctgcaaccttgggcacagcccacttcagttgggcatcagcttcttacacacacataattaagacacaccccactttgaacatttccctcgaggccacagcaggacggttgggctggggcgggatggggacagtgtgtggggcttgcagtcggggactgggggggtgtctctgggctgggagatgcagaggcatttgctgt

SEQ ID NO: 12732 - DNA, 3099 bp, Homo sapiens
ccagactggagtacagtggtgtgatctcagctcactgcaacctccacctcccaggttcaagtgattctcctgcctcagcctcctgagtagctgggactacaggcgcgtgccaccatgcctggctaatttttttttgtatttttagtagagacagagtttcactgtgttagccaggatggtctcaatctcctgaccttgtgatccacctgcctcggcctccccaagtgctaggattacaggtgtgagccactgtgcctggcctaaaagtgtgtttctttttaataaaataaatgtcatcaacagactaacaggaacaaataaacactagatcacagaatctgtccctggatatgaaagttttattgtgtcttggggtaaagatgcatgtgcttttcctttgcatttgtccaaggccagaatccttggattttgatgctccttcttcccacaaaacatagaagatactgtgtattgaaagggtgtgatttttcatagaatataggctacagaacagggctggactttttttttttttttttaagaagccgagagcctatgtttatataaatatcctatgtaattaaaaagaaaaatacagttaaatcccagaaataaaagaaatttaaatatagaaaaatatataacttatcaattgaatgtttccaaacagaagagttttagcttctgtcaggcattgcatatctccagcatacgtttttgagaacattttgttctgaaaatttcctgttggcatttttctctgtgggtctctaggtttctgaataatgtgttcttatgtttacaaatcatgctgtactttagtcaaccatggtttatctttggaggataactagtacgttaacatttgccagattttttcttttaggctgggtaatcattgagctaactagattgcaaaatatgctactttaaaaaatgtaattagattttaatcatctctatattgtatgtgtggtttgtgtatctgctgctgctttttcaccattgatcacaaggggcagtcatctgattccagggaatagaagatggaggcttgctctggcgtgtgcgtgtgttgttaatgtatgcatggaactaatttcagcttgtagaaaatgaggccccatatgcttaacagatgctcttctctttttctccagggttccgctatggaagtgatatagttcctttctctaaagtggatgaggaacaaatgaaatataaatcggaggggaagtgcttctctgttttgggattttgtaaatcttctcaggtatgattgtgaacaaactaaatgagctttttcctagctgttatttgaaatggtatgcttttgattggtcattttatttataaggtatatttatttcacttttaatttttctaaaatgtagtctgggggttaatgttgccatggtatgtattttatacattgggaaactgaggttcagagccgttaagtaaatctatatgagcatagcaaactaaaaatacaggatggtttttgaatggggaatggaagcggagatgaggggtatttgaattatgtgggcctaaccctcatccctttgaggttcagtcttcttgagctggtattatggtgaaagtgctcataatgtctcaactctagaggtgggagggcataaaaatgcatgagaaacattgcccaatacagcacattgcatgttcttgaaaataaaccgcaggctccagatttcatagatcagacaaagttgatcttggtagataagtgcaggtggttatgattttcagaactcttcaatactcattttctaatctggtattagtagagctgtcttgacccctcttgatactgtgctagataagttaattgaatttaagggggtggggggagagacatgcagtacttatttttgatttaatttctctttctttcaacccttcccctctaagtcttcactcaagcctctactgttcatcagtgcctcagtgttactcttaggaggaaatgcaaaccacttagctttgtttttaggagacttcatcatctgatctttgttaatctctgtaatctaatttttcacctttcctctcacacagtggcactgtactactccaagagcagttctccaaatgtaccatgcttttacagcactccagacttctattgatactgttttctctgcctggaacgcttgtgcccagacttttctcttagttcctatttgtccttttaagtctcgacttaggtgtcaccgtttgcagaaaccttccctgatccctcatgaccaggcttggtgccctccttatgtgctcttaaagcaccatgtaaccctggaccataatactacactgcagttaatttcatatttatctattgaagctcctcaagggcaagattatgttttgttcactgttgtgtttacagtgctcagataatcttgaacgcatgctgggtgctcagatatttgttgtgttgtattgaattaaacttcaggtaataaggtgtttttagtatctgaatgtttttcagtaagaggattttgaatggaatttcttggcaatgtgtgtcatggttatacatgttacttattttggatcaaaagcaattcttttcctctcttgtaggttcagagaagattcttcatgggaaatcaagttctaaaggtctttgcagcaagagatgatgaggtgagttggcagcaggtctttgaggtagtgctacagaattgaattgtaagtctatgaaagcaagttgtttggggcttttatagtttaaaatgacatgaattcttgcaataggagtggggaaatccactgatgtttaactgaaaatggagatgtggtaaatggatttgtgttagcatgagcacaagacccgaggacatggagaccaaggaagtattaaaaacattttgaaccactgcatttaggaatgggaatttcacagtcaaatgttaaggagggttggggtcaggttgacattttgtgttgtcataagcatcctggatgtgcacttcagtgactcactagactgcttttgtcattgaggaaatgtgtcttttctctattcctctctcttggtactcttcctgcctccccaagatactctgtttt

SEQ ID NO: 12733 - DNA, 3060 bp, Homo sapiens
ctccatgtcaccaacatcaaaaaatggaaggtgaggcccagcaggtgggtggtgggaactctcctgtcagaggatgtagcttgagtcggctgtgacaagcagacctggcccactccttcctggtcctgatgccctggaaagaaatgcttttcccccaaaacctagtggccatttctcagttaaactttgtcaaactgtgaacacatggactttcaggagaggagcccactggatgcaaagaaaatgtagttccggacgataggttacttcatgtctctgagctcctctctaaagggtgtgagaacattgagttacattgttccaaaacttagtacaagggcctaactgctttcacccccattgtatgatttgcctccctttaaaaaagttgtcataaaatagacataaaatgtactgttttaactattttgaagcataggtttctgtggcattaagtaacaataagtaatgcatgttattctgcaaccactaccaatatctaccttcagaattttcatcttcccaaactgaagctcggaactcattaaacatcaactctccattatcttaattatgtctgttttgaattctaccacttgagggcgacagagaatcaaagtcggagtgatttgatttgagaaaataaattacttccacaaacatgcctacccagaaaaagggaggattaaaccattttctcaacattttggaatttcatctgagaataacgataaatggaggaaagttaattcttaaattatccaaatgaatgccttaatcctcacttgatttagtttatgtaaaagaaccttgtagattgcagaggaaagttattcaaaatctagaaatgtcttctgctaaattcttaattaagagttatgcccactcttctaaccagatggcgggtgccaaaagtattcagtaggtggcaggaagagttgggaagagttttgtggtgttggtgaggctcttgccaggggatgtctctgtgcaggtgttgagagagtgattggtgagggagagaatggtgttcttgttctttatctgaacaacttaagacagactaactgcaggtgggaaaaagaggcccagagggagcacatcacatgacacctagtcccaggtccccgtggccagatcgtagggccactcctgcttctacaaaacctcttccatcagtcattgtctaggctgataattcactgtgtcttgttagatatgctaatgtcaagttattctcttaggagccctgccgaatagaactctacagagtcgtagagagtttagccaaggcacaggagacatcaggagaagaaatttccaaattttacctgccaaactgcaacaagaatggattttatcacagcagacaggtaggtggccttgccagtgtgcgtcgtcagggtgaaagggactactgccctacattcctgccaagccacggtcattcatgtcaaagaaggtccactccaaagtagacaccagaagtggttgtattgagccagatccacccctctgggaacctggaacagctaggtgaagaaagcctattgaacaggtcaatatgtcaccaccagaggtggaaaacctgcgctggaccaggggccctggggctaagcctgagctccatcactcagcaagccaatagctatggaagactttcctaggccccctaacgcttggatcttgggttcctcacctatacaagagaggaagggaacaaacttaacttagaaaagcaagtatctatttggacagctcttaacacttttttctccttgaactgtctaataaaacacaacaacatttttgtggcttgccagataataaatgagatcaaacagaccaagatttcatattgaggagtgctttaggtctcagtgaagtacaggttctgtagattttattgggagaaactgaggactaggccctgcttcacaggcaatgaacagtggggcacacacgagacatgttccctctgggttgggctcccctgacatcaggctatgaagcagacagctgtgcacacactgtactgtttaacacacatgggaagtcattattgcacatgccactcggtcactgtctctattttatgatgagaaccaggagggtgtgagatttgcctgcatcatgggcagctggtttcacagccgggactcttggcttggctctgcagtgctcggctgcactgaaaaaagggccagctatggctctactttccctgtcagcttgtcatctgctgctcttgaccttggtcttgtctttgcagtgtgagacatccatggatggagaggcgggactctgctggtgcgtctacccttggaatgggaagaggatccctgggtctccagagatcaggggagaccccaactgccagatatattttaatgtacaaaactgaaaccagatgaaataatgttctgtcacgtgaaatatttaagtatatagtatatttatactctagaacatgcacatttatatatatatgtatatgtatatatatatagtaactactttttatactccatacataacttgatatagaaagctgtttatttattcactgtaagtttattttttctacacagtaaaaacttgtactatgttaataacttgtcctatgtcaatttgtatatcatgaaacacttctcatcatattgtatgtaagtaattgcatttctgctcttccaaagctcctgcgtctgtttttaaagagcatggaaaaatactgcctagaaaatgcaaaatgaaataagagagagtagtttttcagctagtttgaaggaggacggttaacttgtatattccaccattcacatttgatgtacatgtgtagggaaagttaaaagtgttgattacataatcaaagctacctgtggtgatgttgccacctgttaaaatgtacactggatatgttgttaaacacgtgtctataatggaaacatttacaataaatattctgcatggaaatactgttatctctgtggatgtttatttagtgatattatctttttgaaatccctttgtccttcaccctcaccttccttatgcattttg

SEQ ID NO: 12734 - DNA, 3058 bp, Homo sapiens
accagtaagatcacatggtggctgaaggtggtgtggctagtcagggacaggtcccttggccacagagccactggcgggtggcaatgtgccacgaccatggggtctggcagagatggcagtgtccctggccacagtgtccagcagcagcatggcagccgcagcagggctctgtggtcagacaggggtgctgctgtgacctgagactgtgggctcctttgaaggtggtgaccctgcccctcgtgtggagcccagctgtgctgtggggctgagctgtggtgtcctcctctttcaggatgtggctctgttttcactgcctaccagctctccagccttccccttggttcttggagacctgatttgcttccaatcaaccccttcctactcagtggccagcctatttctccatttgcaaccagcaaccctggctataacttctggggaaacttctggctataacttctgaggcacggagcggggcaggagcttgcccagggtcacagcgctctcggccagtctgggagtggcagccaggccacctcctcctcctgcaggaagcttcctccacctttcagcagccctggagccgcatggagcagggaagggagttgtctaccctccggcatcctgtgtgttccaggctgtgtgggagcaggtgcagctgccaggcatggcaggagcctgggcccgggccagcactcaggaatgcagcagggccctgcctctccctgtagggataagcaagtgccaggcgcccagggcagcggatgtgtctgtggctacagccccaacggcccccgcctccgcaccggctgtcctgggccagccccttgggggcctgggatgtgtggggagcatgaatggggctctgtgacccagcaactgttctgcggaaggcggctggtggctgcacaggtgactgcgggggtgggtgggggatgcaaaattctgcttcctgggcctggtgtcccccgccttgcatgaggccctgacaagacatcaccgaagcaccaaagccaacccttgtggcccaccggagacctgtctcttggatcacaggggcagtggggaggggcgcccagggctcccgatgcctctgagccctgctctgaggtcagccgatgtggctcagtcctggctgtgaggcctcacgctgccctgattccatttgctcctcagtgcgaggcagacagagcccagcctagggtctggatgggatgaaatgaagacgtctcctccctaacgggacactgtctaccccttccttcttctcccccgagaaccgtcagccccgtgaggatggggtctagggtagggcatgtggacggagctttgctgtttgtccaggtgcttatcttctagggtgccatcgcccctccccactgctgttcccgtatctgctgggtgtccccaaccccagggtggtggaggccgtctctcggatggggctgacacccaaggcacggacctgccaggtcccccaaagcacatggcctctctgcagaagaacctggatgtgacatctaatgcccaggccagagcttggggacagctggactggagccacagggtcaaggagggggagtccagaagcgcaaagtccacccagctgggagggctgctggcaggtcctttacaaagcaggcagctcctctgcccatcggagccggctggcctaaccagggcctgctcttgcctgggatgggggcagaagaggtggagacctggggccctgaggcggcactgtgggtcctggacccgcccacctgcactggggtccctgcaggcttttaatgggaacagaaatggaggaagagacagaggctgccaggggctccccgacccctactgcctgcctggggaggggtcacctcagtgtgggggaagcctggggatgtgagagcatcctaggcctgggctgcctgtggccagtctgttgtccgggtgtctagtgacccctggggtaggggcagatgccagtctgggaagccggattgtttgaagaccaactttaaagttgggagcagtgcccagagcggggccgatgtctgctaggtggttgtctctgctttttgaaaaagaagtccccgcccgacccccgccccgccaggcgctggtctgagcgtctgagcccagatggtgcgcttgctccagagggcgggcggctccagtggccgccgcgggacggtggggccagaggggcccgtgggggtgggggagccgcccgcaggagaaggagccccgcccgcgccggccctggagtcgccggtgtcgccgccctgcccgcgggcccgccctcctggcccagcccagggccctgcgagctattttgaaagtgaccctgggctggggcgccggggcgagcgcggcggcgcggaaccatgacagaagatgaccgaggcggcgctggtggagggccaggtcaagctgcgggacggcaagaaggtcggggcgcgtcgggggcgcggggggggggggcgcgggcgcgggcggcggctcacgctcccccctgtccccgcagtggaagagtaggtggctggtgctgcggaagccgtcgcccgtggcaggtgagcggggcgggcgggggacggggggcgcgggggtagcgacacgggttaccgaggcccggggcagtaatgccagcttgcccaaaatcgccgccgctgtcaccccgccgggaaacccgagagccccgtgcggacccggaccccccggcgcccctgggagcgcaggtgggggccctggacggaagaaccctctttccagcagggcagactgaggcccgaggggctgcctggtggccctgtaggcggaggggacgcaggccctgagccccccagcagagcagcaaggggccccccagaagcaaagccccacatacctgagggttgagctgtgcttgtggaaacgctcagagcagggcccccgaacccagcctccaggggtgctgcgtgggttagcgctgaccctggacccctcccaggcagacgagaggctgggctgcggtagggcagggcagagtgactgccacattgctgggggaacagtcctctgggaggag

SEQ ID NO: 12735 - DNA, 3055 bp, Homo sapiens
cttccttggctctggctaaaaatgccctgtccagagcctcgcccagcccagcagcacaagactgccctctccttcacccctgctctggcccctcacctcttccccagggaggcaggcaagcccagtggctccaccatctgccagcaatgggacctgatgggggacatgctaacctctttgcgcttcagtttccccatcttgaaaatgaggaccacaacagtgcctcctcacgggatggatccggaggttcctcaacgtggttcatgcacagcggtgggcaggtgccgggctcccagatcatgctcagcacatggcagaccccagactccacacctgccccttctccccacgggcctcacgacctgcctttgccccttcacagcctgttgtggacatctctccatgtccacaggcatgcctcaggcccagcattgggtatactgcaggccctggggacgggctatttctccctctagtccaaagtccctcagtgtgtggatcccagcgtctgtagggtggactgagggaaggctatgggacagggagctgggagggcccctccactgctacgtggaggtctcctgttctcccaatttggtggcccatttttcccatctgtaaaatgggctcactgatccctaagcctgctccttgggaggaaaccttaccgaccagcagaggctagaaccagccctcaggagtcatcctgaaatgtaagcaaatgactgtccccaccagagcccacacatacggctggagccctgcctggaagaggctggagctgtgcttgtacctggctggatcctggctgcatccagcagttcctggactctccggaggatctcgtgctgcaggccagcttctgagacgcccacctgtgacagttcaaggaagtgcagactgtggcctgggcgggagcccgctaaatggtgtgagccacgtggcacaggcccaggctcacaggaccgtcgacacctcctgctggaaatgtggaagccttccggggcctggcggggcccacggtcaggatgaggcagtgcggcaccatagctgtgagggcaacctccccaggcctcagcccaacaatcagtgtggcaggggttggggggaaactgaggcccaaagggaaaccagcactagcaacagctatggtttagcaactgcttcccggtgccaggcttcacctgcacacctcagccacttccccaccaggtgggggaggagagaagccttggaggccaagccactaagcagcagcagcacacgagccccacagtccctcagcctccagagcctgagcggcatggccttgtgaccctcagtgccatccagtcctcttggaccctggtgtctgcatctgtccagggaggggcaggagagtctcatgaaaaagaacacgaactctggggccacactgcttggggtggagacctcactctgctgtgtgaccttgggccaagttattgccttactgggtctcaactgaaagatgatgataatgatatgtaccctgctgggctgtcgggagaattcagtgagttcgaatacaaaaagtgcttaaaatggtgccccgcacgtgcaggtgctacaaagttagctggcacagcgatgagtattctgttttgaagaataagtggattaatgtgctgtaaagagctcagcttgtgcccagaaaggaacaggggctcaggcagtgctgtggccacgacagtttgtgacaccatgaggcagggcagaggctggatcagataagccccaagggcctgtcttgtccctccagtctgaagatccagtctgatcaggtcagcaggacccacctccccaggatttcccagtgagacagtgtgcagggcacacacaggcggctggggcagatgggcaggtgttctggccatctggaagcaaggtggccctgggccattaggtaaggacaggcctcaacgaggactacacaaggagcagatcaacccccggctggtcaggacagcggccttgcgtgcccctcccctccatgcagacggctgctgcccaccttggccaggtcccctgggctcatttggctcagcaggtccagtgagaggcggtggtgcgcaaagatgggcaggtagtgctcagccgacagctcctccaggagggccaccagctggcgctccatcccctcttcctgcaagacagaaacgtgtaccatgagcaggaaggaagaaaagaacccactgtttacaacaggaaatgaagggtttgaatatttataacataatacatagaatgtactcgggatttttcctacaaaaactcataggtaggcacacagagatagatagatagataggcccaggggttcactgccgctctgtctgcaaacctgaaaatagtaagcaacttgaacatccaccaagagggggctgtttcaactgcctctctgtccccgcaggtgctggacagacagtggctcccggcacaggctttgctctactgtgggctcagtggtctctgccctgcacagcagtgaccagtgccttgtcgtccccctcaccagaatgaacactcccttactctcgcttctgtctccactggggcttggcacaggatctggcatgctagagtcaccagaaaagtaacaagaggcagagcatggtggaggcaccacaggcgcctctgggaggaggtccccagggctccctggccgggacaggcaccagcagtccttacttgcagcttcaaggacaagggcttctggttcaaaagccgttgatactgaatcagccagtaattttcctgcctggtttcacttttggcttctaactccgtctgccaggaatgaagcaggcaatgttagtcacaaaatggtaataaaacctgtaataacaatgatggttgccaggcgcggtggctcatgcctgtaatcccagcactttggggggccaaggtgggcagatcacctgaggtcgggagttcaagaccagcctgaccaacatggagaaaccccccacctctactaaaaatacaaaactagccaggcatggcggcacatgcctgtaatcccagctactcgaga

SEQ ID NO: 12736 - DNA, 3038 bp, Homo sapiens
tattttctctctgtcagcggctctgctggccagcttgcctttgggaaaggcctagctgtgggcggtggggaggcaggaggccgactccagttctgccccagtcactgactcactgcatgaccccagatgagggcaaacgctgcctgtctctgggcctcagtttcctcctcagtgaaagggaagtattggggtcagtgaaccccaaaactgtttgtatttccaaggtaagcagaatttgggggctgccagagccagaaggttaggatgtagagccacttcctctccccatggctggggtggggacactgggcctggtcccaggatcttggggtgtagggttccagcactcatggagcccagcaccagcccccacggggtcatccatgcatcagctgacgtgtgtggagagccactggtgtctggccctcgcatgcagtgcattacacagtctgcacagctctttgagggaggccttctctttatttctatatcccctacaacagttgaggaaactgaggcagagggaggcttaagaaacgtgtccaagtcacacacttggtacgagggcgaagccaagatttgaagcagatccttgtgattactgagcctgcctctcaatcaccaggcctctttgcctcttatcgaggccctgggcaccatttctccctgggagcccctgcctgtgcacagtgaggtggagcccaggctgaggcccttaccgagccccttggcgtgtatggaggcctatgcttcacgtgatgtgggcaccacctctcccgctgtgagccacgatctttgttctgagaggagctcagccctgcagtcaggtttcctggtttttagaggtgggcactccggtgcagagaggcacagtgactgttcacggccttgcatcggggcaccttcacagccatagcttgaattcagggttctgcacatcccagcctccagctgagaccccagagaagcccaccagccaggcctctgggtgtcatcctccctcctgccctcagggctctgtgggcagtagggggcgtgttggtgggccgttgaggagatgggccagctgagccccacccaacaaggatggttgtgtgcccacactcccagtgcacccgcaggccctgcacttctgcctgctgccatctctgccccgagcaccactgtctctggtctggaccctggagcagcgtccccactgctcttctgcctcctcctattcctccaagcccttctcccttcacagccatgggggcttcctaaactagaactagggtcacatccctcagctgcccagatgctgctgtggctcctgcccaccctctttcttactgtccctggcccctggtctccactcacggcacccctcccttgctcagtgcatctgctacaccacagaccccaagtcctccactgggccaggcacttttctctatcttggagtcttcacatatgctgttccctctgcctggaatgctgtttgctgcatcttggtctgcctctccctggcttgttgctcaacttcacttctccagagaggccacctgggaccttgagtctctgctgtgtggctcctggactcattgtttgtttctggcaagcactgcttttacttttgtatcatttgattctttgctctcgtctgagtctccgcaagggtagggatcactatcacatcagcatgcttgctgaatgtttgttgaatgaatgagtgaatgcgaagtgcctttgtcattgcatctccctggattctcccggtgaccttgagacatactttgaccccactttgacacgtgaggaaattgaaccccagagagtctgagagcatatctgtaatcacataaccagtaactggcaggtgtggggagtcaggggcctgtttatgccagggcaccccatcatgtcccttcagagtccccctctgtcagatggggatgatatggtggcagtgggcagtggcctcatggtcagtgccgggcctctactgtgggtagacccgctgacctcccactttcattgcagcaggatggagctggagtgaggtggaggggccgcaagctgctgaccggcgtgtggaacactggtggtttgcagatcactgaggtaggtgtgccacggggctggcgggaggtggctgggtcggacgcaggtgagtcctcatgagggcaggtgctagccctagcacgctggacctttgactcgggcctcagccctgaggggcaggagcgggcacaagccacctttgctgggacctcatcatgcccccaatgggctgtccctctacctggcacccagggacctcttggcctggcctttctctagagcagctgctaggggtgggggctgcaggtctgcccggggagaggggcaggtctggccacctggtcttggcacagcagccctgtctgcaccactctaaaccctgtggagtatgggcagccccaccaaaggaggcctgggtgagcaggagcatgtcggctgaaatgggtgcagggctacccaccccttctgcccactctcacaaacatgccgagatggatacactgggctctggggtcagaccacctggattcaaatcctgactggcatgcatggttactctgtgcctctgtttacccatctatcaaatgggaatgagatggcggtgcctgctccactctcgcagtgaggagactacacacctggcacacagcaaggactagggacatgtcagtccttttcctcaagggtgctaggacccacctttctccccacacacctcagtttccaccaccctgctccccctgaggacccaccagtgccaggatggacacgaactggaccccccgcctgataaggggggcagggcaccttgaggagcaactgagagcagctggggccagcaggtcctaaggtcggggccagcaggtcctgaggtcaagcccagctctgtcccgtgccccagcatttctcatcatggggtggcatttcagggttgatctcacttggccctgtgcccgagggtgacctgtgtaatccctgtttacttggcaactctc

SEQ ID NO: 12737 - DNA, 2998 bp, Homo sapiens
ggaacttggctgctttttctttctgcagttagcagagggccttggccaacacataagcctttctgccagcacttggcattccagctgacctcgacccaaggcctctgtgacttcaggaggcggcagctgggaagggtcagggcagttccaggcagagcacagacgtcagctcagacatcctaccccccgccaaccccccgcccccggggtttccagagcaaccaacaccaccaagctccaggacactggaaaaaaaatctttgcaaagaagcaaggggccatctcagaaaatccaggtcccccaaattgatgtagggagaggagggctttgacagcattcagcactccagagggtcacgaggatacagaaaccatttggagccacctctgcttctcagccccacccaggcaagccctggatcttcaagggactgatttgtacctgggaataaactcatgcatggatgagattcagagtcaatcacaccctaaaatgcagagcccatagtattggtgagttgttcatgtgtctctgaagcaaatttagggctgtggttcaaacatcgtaaaagttaaaaaaaattcactggatacacacagtaggctcttttaaattagcctcatttgaacttaattacatatttaaatactcaaataataaatgatggctgggtgcggtgtctcatgcctgtaatcccagcactttgggaggctgaggcaggctgatcacttgaggtcaggagttcgagcccagcctggccaacatggtgaaaccccgtctctactaaaaatacaaaaattagccatgcatggtggcgggtgcctgtaatcccagctacttgggaggctgaggcagcagaagcacttgaacccaggaggcagtggttgcaatgagccgagatcgcaccactgcattccagcctgggtgacagagcaacactgtgtctcaaaagaaaattttttttaataaaaataaaaaataaaataaaataagtgagtccactgaaagcggtttctaccttgatagttgggtgtgtggcgtcatcaacatcacagaaggctgatcgatattaccaggtgtggttgagtgcaagtgtttgaggtctcgtgggggaagagtttggaattcagaatccattgaggccttcactcaccactttccctctctcgctgtgttcccaaatgtgccacttttctgttggctcacatgcacccatgctctatttgatattcagggctctgaatttcaagccagactcagtcagtgtgattgtcactgctttcctgtccttcctttatcatctgtagacttgggtcccgtttttgcaggttgatgttctgtcttcgctgggctctggactcactgctcacgagtgcggtgtctgcatgggcactgcccagacatgcactgttggtccctcgatggctgcatggtcaggcctcagggctctctgccaggccgacctacagcccatacagacctgatttctgggcctggatccaggggatgccatctgggaagtgcgggatcttcccacgatgtcactgtaaaactcaccagggaggttttagaaattgaaccggcatcattcagattccatcctgctttttggtcctgagaaaatcctgcttttccctgagtaactgggataatgggtcaccagctcccatgccctagatgaggactagttagcattttctagtgcctggagatttccagatggaagctgtacttgggtctgtgtatctttgttacaggattcaataattcatgcactgaatttcccttcccggcaactccagacaccaaatcgcttcccatggtgtcccccaatcacttaggaatttagcctgtgtctaaagaccctctctgcagcctgacgtggctagccatcccagtacttccacgtttttcatgcctttctccaacagcgttgccgtggccccttaggcggcgatcgttttatcaatggtcgctccctctttttatctgttggcaggagccctttttcaacgccctcgctggagtctggcctgcacgccttgctgaatgaagccggaacctcagccccgcttccctttgaaatgaatgttcctggggcgccctctcgtggattttggagctaatcgtctgtgaatgccaagtgatggcaactgccctcccgccgcgtctccagccggtgcgggggaacgagaccctgcgggagcattaccagtacgtggggaagttggcgggcaggctgaaggaggcctccgagggcagcacgctcaccaccgtgctcttcttggtcatctgcagcttcatcgtcttggagaacctgatggttttgattgccatctggaaaaacaataaatttcacaaccgcatgtactttttcattggcaacctggctctctgcgacctgctggccggcatcgcttacaaggtcaacattctgatgtctggcaagaagacgttcagcctgtctcccacggtctggttcctcagggagggcagtatgttcgtggcccttggggcgtccacctgcagcttactggccatcgccatcgagcggcacttgacaatgatcaaaatgaggccttacgacgccaacaagaggcaccgcgtcttcctcctgatcgggatgtgctggctcattgccttcacgctgggcgccctgcccattctgggctggaactgcctgcacaatctccctgactgctctaccatcctgcccctctactccaagaagtacattgccttctgcatcagcatcttcacggccatcctggtgaccatcgtgatcctctacgcacgcatctacttcctggtgaagtccagcagccgtaaggtggccaaccacaacaactcggagcggtccatggcactgctgcggaccgtggtgattgtggtgagcgtgttcatcgcctgctggtccccactcttcatcctcttcctcattgatgtggcctgcagggtgcaggcgtgccccatcctcttcaaggctcagtggttcat

SEQ ID NO: 12738 - DNA, 2929 bp, Homo sapiens
tgaattcatgacaagctggactccagggtcaggtgacggtgacacattctccaccccagaacctgcccagtgacacacaaaggacagaggccctacctggggctcttccagggcatgacctacacccacatcctgccgaggccaggctcctctcgcctgtgatgactcagcccaggaggtttgctctgttgggaattcccctgcttggggcccgaggggaaatggggcctccagccttgattggcgagagcacgaaacccagccaggggccctggctccccagccagccctgagactcacgactcagtaactctgagcggtcgccttgcccagttgccagccccaaagccagtggatgcactcggatctcagtgctcccagaatgagcccttctgccccgatctcagcccgtcctctgtgactctgtggctgtgtgtggccttgtctccctctctgctgacttccaaatatcctcaggatccacaaaaagataaattttaatgagctgcatcaccacccagagtgggcctgggactgagccagagctgggaactctttgttgaatggaactcagtctgtctgtttcctcatctgcaaaatgggaacagcacacccgctgcttccatcaatggtggcaggagaatggaaatgaggagaggctcggcatgactttgtgaacatttgccctgcacagttgttagaaactgtcatcatcaccagctccctccacctccatcaacctcaacatcccggccaccattgctgctgccattactatgcagagacaggtcctcgtttagatggtgcagtgggctttttcccagtgctttattatcctgctaaaaacattctaacaatggcaggtaactggaggccacacatgcactaagtatgagggtggccgtgacccaaggatcctgggaggtggaagcccagggcctcatcaagacgacagggctggagacagctgaggtgagcctggccccaggctgcctccacctgccggctgtctctccttctcaggaccaggcactaatgcaaaggacactgaacccagcagctgtcagggctgaggaggggccttggctctgggatctgttggacactgaatctctccacagctacagaaacagtgtggacatccccagtctggtcctggtcccacttctccattttgcaaataaggaaactgaggcacagagcggggatggggcttgtccaaagtcacagggacagtcagtgtggaggtcggagagctggagagaggacgaaaaggcaggaagaggccaggccttcagaggacagggtggcatcaggagctgggcggacagtggtagtctgaacctctgctccactcgctgtcatgctgaaggtgaccctgcacagttaagtcccctctcacagcctccctgtcctcatctgtaaaaggcacccccatctacggttgatggatgtggataaatgaggacacatgcaggcggtgtcctgcccaccccagtgcgggtcagtagaaggccagaagcaggggatgggagaaggcaggtgggagggcgtgacagcggcgaggatgaggaaggcagccaggcctgcaggcagccctgagagcatgaagcagaggggtgagcaggttcccctcctcctgccacccttgctcctctctaccaggctctggccttgctggggtgtacccacagaatctgtaggctctggcctagccagaaagagtgtgggtgcttctcagggtcataattaccccatgccccacagggtgtgagtcactggtagcagagtcctccccaatcccccccagaagagtgtggtgaaaggcccgggccactggggtgtcgagagtgccaggcctgacctactgggggtggtgtcagtaggggccatataccctgttctcacgacaaccccaggccaactcagatttgtggagcggccatcccacctccttccggctcttccaccctcacaggagcctggtgggtcgggaaaactgaggcctagagaggcaaaatgatgataaaatgaagagtgagtacatgtggaacaccctctgtgcctcacactccactaagctcctcacaccattcacttactcaggcctcaccggccctcgagcacaggctgttttcatgccaccttgcaggagcggggactaaggcacagaaaaggtcaacctgtctcacgtcacacagccaaggagtgccagagcccagatgtgaacctgtgtctgtctgactgcagccctggttccgacgcccttcctcatgcatcctataataacactatagaggttactatagtgtctgctcctacccctgggacaagatcccctaatgagctggcaggtgggcgtggggggcacaggtacagcttggcttctcagctttgctcccctatcctctgctttgccatgaatctctcatccagccccgcagggatctgcctggccagcagtgagcctgagcccctttcatcctgggacctgccgaccacggctcacatcctcctgggtgaagaatgtcaccttgcttcctatctgcctctttcgtggttggctggggagggggaccggggggtggggtgaggttaacctcattgttgtcttatatggtcatttaaatctcccagggcttcctccaagggccaaaaataatccggagacacagcagctgtgtccagcacacagaggacccggccatctgctttggttcagagccctgtgtctgtcagtcagtctctccctggctctccctccatcctcattcctgcctgaagccatgacccgcttctcctatgcagagtacttttccctctttcactcctgctctgcaccctccaggtccactgcacctcctgagagttcgccggcccgggccccaatgggcttgttccaaggggtcatgcagaaatacagcagcag

SEQ ID NO: 12739 - DNA, 2879 bp, Homo sapiens
tctcgagtagctgggattacaggcatgtgccaccacgtccggctaatttttgtatttttagtagagatggggtttctccgtgttggtcaggctggtctcgaactcccgacctcaggtgatccgcccacctcggcctcccaaagtgctgggattacaggcgtgagccaccgctcccggcctaaaccactttaaagtgtatgattcaagggcagtatgtagattcatcctgttggatcatttctagactttttcatcatcctaaaacgaaaccccaagctgcttatcttcctcccctagcacctggcaacctccaatctgtgtcgcctctacggatttgccaattcgagacatttcatctggatggaatcatacgctatgtggccttttttgtttggcttctttcactagcataacgtttcccgggttcctccacactgcagcatgcatcggtgctccattcctttttgtagccgaataatattccattgcatggacagatcacattttacttttattttctaattcaacagtgagacctggtgtgggccccggcgctgggcctgggaggcgagggaggggatggaagagagccccgtgactggcaggaggcactgtggagtgtggggagaaggggtcgggatctgcatgctagagagaataggattttatttacacgtggcaatgtttatggaggccaatgcacaactgccattatgggacgcggactcctttgaaagtctcatttgtgtaaaaggaaaagcagtagttcatgaggagggggagaagggctcaaggacagcaaggtaaactacccctggggcgggggaacgtggtcgtcggtgggcccagctttggaggctaggcccgtgaaggtcgccccgtgagcaggtccagggcaggccgagtgccccggggcccgcattcattgcttacagagcaaggggagcctcccgggagggaaatccaacggttggaaacttcgatttatcccaaaggcgtgccgagtgggaaggcaacattttgatttcccaaacgttgcggccagcggcttcttccacggcaggcgccttcaggtctctccgcagggtcgggaccccgggcggcgcgcggcctctgggacgccgagggagggcgggcccacagcgcccggagcgcggacagcggccacagcccgccgcctagaagcggcgccgcccggggcggggggcggagccgagcgcgcgccccgccccgccccgccccgccccgcagccccagcccagcgcgcgcaccaaggcggggcggcgcgcggcccgtgcgcgtgtccggggccaggaggcggtggcggcgagcgcgggccgcgcgtgcgcgctgcggctgggcgaggggcggcgcgggcgcgcgtctgtcagtgacagcgggcggggcaggggccggagatggtggcggcggcagctcttccgacatgaggcagcggccgcgggggacacggcggcgggcgcggcggcggccgcatctctagctcggggaggcggcccccggcgtgggcgcgggcgggcgggcgtcccggccggcgtcgcgggagcccggctctgcggcagcgtctgcaccgccgcccggcgaggggcccgcgtccgtggttccacgcgctcggtcccgggacagctgcggccgcggcgggagcggcggcgcactcggggggaagcaggccccactagacgggccgcgccgacgggctccgcgcactcgcagcccggggcgcccccacccccagcgcccgccgccgcgggcagggccggcccggagcgcggggggcggccggggagcgcgagccgggggcgcccgccgaagctcgctgctccgggtcggggtccgggcccggggccggccgcgcgccgcctttgacgcatcggagcgcggctcctgcaggatggagggctccgcgccgccagcggagttgtttgtgcgcaggcggctcgcggggctgggagcgctcaaggtctgaacttccctccggagccgcagctggaggaggcgagcgcgcgaggaggagaagccgcgcggcgcggaggccaccctcggggcgagaggcgcggaaggcgagcgagcaaagcggtcccggagccacggcggccacgcggcggggacccccgggcgttctaggtccgtcccgagcggttctcgtgcgcctcgaaggtgggggcggtgggggcggtgggagcaccgctgagccgggaaccacaggaacagatggtgcctgtccaggtcgcgtgctggagccgccccttaggacaggagcaggtcccgggcctctaggcgtgcatgcctaggtgggagcgccgctaactctccccgttttgctggcaggtactggtgaccccggccggggcaggccccgggactcgacaacatggcttccccaccccaccagcagctgctgcatcaccacagcaccgaggtgagctgcgactccagcggggacagcaacagcgtgcgcgtcaagatcaaccccaagcagctgtcctccaacagccaccccaagcactgcaaatacagcatctcctctagctgcagcagctctggggactccgggggcgtcccccggcgagtgggcggcggaggccggctgcgcaggcagaagaagctgccccagctgttcgagagggcctccagccgctggtgggaccccaagttcgactcggtgaacctggaggaggcctgcctggagcgctgcttcccgcagacccagcgccggttccggtatgcgctcttctacatcggcttcgcctgccttctgtggagcatctattttgcggtccacatgagatccagactgatcgtcatggtcgcccccgcgctgtgcttcctcctggtgtgtgtgggcttctttctgtttacct

SEQ ID NO: 12740 - DNA, 2799 bp, Homo sapiens
aagataaatgggagggatggtgtccccttaatgctgggtgaccttgatcccatggtagatgcaccagaacctggaaggagcaagcagggagggagggaaagggaattctccctggagccatcctgcctttccctgagcaaacacccagggcgtggaaactcccaggagactatctggtggggcccccggctgcccccagcatgcctgcttctgggaacagggccagataagacaggtgactggcttcagggaggattgggaggggcacaattgaaaatattgacttagggcacccatggtaagagatccttctcactgggtgctgtgactgcgctgggctcttacaccacccacctgattcttgctgagggccaggctacatgtgagcagaaggcagaaggttggtattgtttcatgaaatttttgtttcagttatatatatgtatatatacatatttgcaggtggtgataaaatgaatttcttactgtggaccactgccaaaatagatcccctgctctggataatggtgctgttaatgagtactaccaaagagtgagatcctctaaggtgacagtgtgcaaatccctgggcctggccctggggctgagtgggaggggttggcagtggggggttcctgggctcagtctggaagcccagctccatcgatgtgggtagctagggaggcactgtgtggtagttagggaggtgcagagatggggccctcagaggggagcccaggggctgggaagctgaggacccagagacaggagccctggagagagaccgcacagcagagcctgacaggagcttcctgcaccagcctgtccccactcacagtaccctctgcctgtctctgtctaatctccattggtgtttcagaaagtctggaaatgcccccatctcagtcgtgctaagggcttgtgcacttagcccaatgctgaatggacagggtggctgcctggaactctgtgcttgtggcagtggagcaggactgtggggatgcactgccccacccagctgtgtcctaacccctcctgccctgaaccttggaggttgtctcaagagtcaggcagaccccttcacacactgtgcacacccatgcacacacagtacaccctccacatgcaaacacagaatgcacacacgccctttatatcatacacacagcttgtaaaaaggataggaagggggtggtggctgtgactgagtggagtggggaagggccaagtcccacaatttctagcttctagaaattgtgggtatgacacacccaatggctgagaatagactctgaacctctgaggggatggaaaagccaggatgccttagtccctgactgcaaagattgaaggtgataaaaagacatgtctggccacaaggaaaggccatgtgcctggccaaggaggagtacaagcctgagagctggacagctctgggttccaatgccaaatctgctagtttctagatgagccaactacttggcttctctgagcctggctttccttatatgcagatagtcctgatgccaaggtgtaggggaagcacactaagctctctgctgataatgccctcaaaaacttgctctgcctgcctcttgagccttgctgcacagatcacatgaaccttgggatttgaaagcacactgtaaaccagaaagcactgtgcacaggtcaatgactattatacaggtgtagatatctatggcaacaagcaaggtttcaaccaggtttcaataaaggagcctctttaggaacagctgagggggtcagactttcccgctgtgcaccccctgcttcctggacccctcccagcttctcagtcccaagaagaggcctcctgaccacctccctcccaccccagtggacatcagatgcacacacaagcaaggacattggcagagctagctgaggttttattttggaccaaaaaaaaaaagcaattgaattgttttgtagctggaggcatgggcaaggggggtccccaggtagtaaactccccaggtgggctgagggctagggctgagcctcaggtgggtctcctgttcccagtgctaccctgcatagcggcctccttcccaggctctggggcagcgcaggaggggtaggctgggaggggctgccgcagctgttcacttgggcaggacgtcagaggactcagacaccagcttcccatcacgtgtctcgatcttcttcacaaccacggccctggaggagctggtgcggctgaaggagctggagcccgcgccagagccaaagctggagcccaggctgtagctgaggccggggcttgtgaggcccccataggccgagctcagaccacctggtgagggacagaggtagccacatgagtacagaagcccaccccatggcaggctccatgccccttctccctgctcattcccaacatagccccagggatgggaggttaacccagctctgcctgatcagtgattgcatggttcactactccagaactgtcagggaaaaccaggagcagggtggaaaacagctgccatatatatagctgtgtgaccttggacatttagctgcacctcagcttcctcaactgaagacgtttacaggtgtcatataaaaaataaattacagccaggcccagtgtctcatgcctgtaatcccagcactgatcacaaggtcaggagttcgagaccagcctgcccaacacagtgaaaccccgtctctactaaaaatacaaaaattagctgggcatggtggtatgcgcctgtagtcccagctacttgggaggcctgaggcaggagaatctcttgaacccaggaggtg

SEQ ID NO: 12741 - DNA, 2796 bp, Homo sapiens
gctgtttctctcccagaagactcagaacataagcacctggaatggatgggtcgcatttaggactccaaatgagttctgctttccctttttgttttcaatctatgtgctctttcaggtactcaaacctgttaccgttttatcagcaaaatgggactttctaccaatttggtgggatgagtctcgccgggagtgatgtgtgtgtcacggaattgtggtcatgcatcgggatggctaattcactgatgtcagatgctaacgaagtggcctcggctactgagcatcacgtcactgttgggtttagacacaacacgatcttatgtatggatgacagcaccactaataacaaatgccagtgacctaaacggggaataacttcaaatgaaacaaaaagcacctcatatcatatttatcctgaaagacacaactggctgaataaaatctgaatacaggaaacatagcaatgggttgataattttggtggaacttgatgatgtgtgacccacgcccaacacagtgtgacccaagcccccaggagggttctctaagtgagtttggtcggaggctgccattcacagtgacttgtatttgccacagcagctctttctaagcccagtcctgggattatctcagggatcatcccacaccccagcggggagatgggccaagtccccacctgacctcatcttaggtagagaggcttccatggaagtgtgggctggctgtggggggttgagacctagccccgttcttttgacatttcaccctgtgttctccaaactccagcaagcagcttccatagctcattaaatttgactgaaggtctgatggcttgcaaagcaaattctttacaactgttataaaggtttcattgcttaagcatataatctagcaaaactgccaagccccctccactccctaaactctaagacttgccagggaagagaacagtggccagtggactgcaggagtaactgcactcagcccagaactccctggaggacacagggaaggttctggaaaggtggcggtacctcacagggagagacgtggtgctccagggcccaacttgctcatgttcagatcctcactctgcaacccaccagccggctgtgagtggctacacaatctctgcctcagtttccctatctgtacatgggttgttcatagcctccacctcagagggtagtaatgatgccaagctcttagaacagtgctcagcatgtgtgcatcctgtgcctactctatgccaagcactacagagagaaaaatgaacaaaatagggagaaatccctgccctcatggagtttacatcggggcagggggcgggggcggcacagagcagacaatcaatacagtgattagcccccagttaggttaggcatttccaatctttgccaataagccacatatttgcccaagttagggtgcatccttcccatgaactttgactgtgacctttgactatggggtgacatcttatagctgtggtgttttgccaaccagcagctcttggtacacaaaatgtgctgctagcaggtgccccggccaaccttgtccttgacccacctgcctgttaagaaaagggtgttgtgttttgcaacagcagtaaaatgggtcaaggtttagtcagttggaagttgtgtcaaaactcactatggttggttgagggctcgaagtctcccagcattcattaacaactatctgttcaatgattatctccctggggcgtgttgcagtgagttggcccaaagcataactgaccctggccgtgatccagagacctgccccctgacgtcagtggcgagcctccctgggtgcagctgaggggcagggctattcttttccacagtatttaaagctgggaggttctgccaccaagcacggccttcccactgggaacacaaacttgctggcgggaagagcccggaaagaaacctgtggatctcccttcgagatcatccaaagagaagaaaggtaagtagagctttgcatttacattttgaaaaattacaaagatgaactcatttttttcctgagagcaataactatttggcaatgcacagccctggcaaaaggccgtcgaatgtgtttgaaggtgtctgttgttgtttttgttcaggacgcttgcgttttctatttcaggtgacctcacattcgtgccccttagcagcactctgcagaaatgcctcctcagctgcaaaacggcctgaacctctcggccaaagttgtccagggaagcctggacagcctaccccaggcagtgagggagtttctcgagaataacgctgagctgtgtcagcctgatcacatccacatctgtgacggctctgaggaggagaatgggcggcttctgggccagatggaggaagagggcatcctcaggcggctgaagaagtatgacaactggtaagctcggcccccgctgcctgtcccagcaccctgcaggcagggctcccctgcgtctcctgggagttggtggagaaaggtgaatgaaggccttcgggtagtttcagactcttgagaagatgaatgcaatggtcagaaccatacagacttgaattttgtgacattagtgggccagcccaagctttaaatgaggtgtgtgcacaaaagctctgccaactagattcctgattaaaaaaaaggcagcccctctcctacagaccaggtcctagtggagtaaatgtccacctggccatgtcttagatggtctgtgtgttcacactgatggactgttgttagcgtgctcagcactctgctaggcatggaaagccacggtactgaaggagatggttc

SEQ ID NO: 12742 - DNA, 2793 bp, Homo sapiens
gcagcaatgacaaacccatttatgttgatttcacagcctttgggggtctccttgtctttattttgattgttggaaatagagacccacgctttggccactatataacaaagtactaaaaatgtataataatgcaaattcactaatatgtttattaaaatataaacaagtttattacaaatctgtagctttattcacaactaacatccttatttttgtcctatatgcccacgtttgtcctcaagtacaacgaaggactgagagagcatataatcccctctaggtgtaaatgaacgtatttatttcgcttcaactcatgtatgaaaggattaaaaaattattagtccccacaacttaattctcccaaagagaaggtgccaagaatgaggcacctttagccatgcataatctccacccatctcatcaaataaacggaacagtgatgaacataacttgctaagtaagctcagccgtgtaacaagaccctagattcccctcccttcttcatcctaccagaacattatccttaaggttttcctaatcagcagtctgcgtctaactaaccctaactatccagagtcacctaacatatacttatttccttgtttcagattcccattacgcctatcttaatgggacaactgggtccgaaattatgcatgtgtttttttgttttgtttttgcggtgtacttattatccgcactttatcattaaattcctgaaaagctagaacaaaacaaatccgtgtcattcactatgtgcatcctctctgcttggggacgccaagggtttcaagctgctgcctccctgccctggtctctgcttgccgtatccagcactgggtaagcgcccaggttctgctccgggactaaaactcatgatcttctggctcaggttctgtgaactgagtcattctggcactgagaatattccgtgactcagcaggcccgaaaaggaggatgtcagaatccacataatttcgagtcttttaaaggcaagccgaggaacacaaacaacacagtggaagaatttcgcagtgggtcgtgcgtacccaagggaaaaattcattccattcccagccttttcacttccttccttgccccggtaaaacgactggttacactttaaatcagcggcaggaaatcgcttcacgaaactcatctggctgctgcgaccaggcccttctgattctccagggaccgtgtcggccccatgaacgccccgggacctctgttcgggaggggctggagcggggccccgggcagcagcgggcgctcccggttcggacccacacctggccgggcggggaccctcttgccgcagcccaaattggcgcgaggccccagggacgaccccgagcgacctcctgacccggcatcgcccctctaaggcgccctcccccgactcctcccgcaatccggagtctcccaggccgcggagcccaaggaccccagcgactcccgcgcggggagcgggtctgcgaggccgcccttccctcccggcatgcaccacccagccgccctcccctcccctcctctcctctcccctcccctcctctcccctcctctcccctcccctcccccaaccccctcccccggctccccgcccacctcgcgcgcccctccccccgggtcgcgcgccgcgggcccgagcgcgagacgccgctgctcccgcccccgccgcctcctggagtcgccggggcggacgcgcagtccatggggcgcggtgggccggggagttgccccaggggccgcgggagttgctgagaggagacagggttgggctttctcctcgcccagaccccaccccaccctgccgaccccaccccctgctccttcctccccgggggcgcgcactcgggcacgcgctcggaagtcgggggtcggcgcggagtgcaggctgctcccggggtaggtgagggaagcgcggaggcggcgcgcgggggcagtggtcggcgagcagcgcggtcctcgctaggggcgcccacccgtcagtctctccggcgcgagccgccgccaccgcccgcgccggagtcaggcccctgggcccccaggctcaagcagcgaagcggcctccgggggacgccgctaggcgagaggaacgcgccggtgcccttgccttcgccgtgacccagcgtgcgggcggcgggatgagagggagccatcgggccgcgccggccctgcggccccgggggcggctctggcccgtgctggccgtgctggcggcggccgccgcggcgggctgtgcccaggcagccatggacgagtgcacggacgagggcgggcggccgcagcgctgcatgcccgagttcgtcaacgccgccttcaacgtgactgtggtggccaccaacacgtgtgggactccgcccgaggaatactgtgtgcagaccggggtgaccggggtcaccaagtcctgtcacctgtgcgacgccgggcagccccacctgcagcacggggcagccttcctgaccgactacaacaaccaggccgacaccacctggtggcaaagccagaccatgctggccggggtgcagtaccccagctccatcaacctcacgctgcacctgggtaagcggtgacagccccgtcccctgctactgctcgccagcagcccagctcccggaccggctccgtcccagtggccggcctcacgggcgcagacggccgcgtgtttgctctctgttccccggcatgggccacacagaaactcctttctccaacttcttaaatagatactgcttttaacatcccgtgagggccaggatgttccgcacgagtctctctgctttcctgttc

SEQ ID NO: 12743 - DNA, 2791 bp, Homo sapiens
caacattgtagaattatgcctgggttaagagaatataggccacaggtgaggacatgtaagagacttttatatgtaaactgtacaagctttagtgaattgatgctataaaaattatgttcgcttgtttggaaacctttgttgtttacatcctggtttcaaatgactaaagttacctattagatatcctccaggggagggaaaggtcattgtattcagcaagggcaaactggttcaacaatcaatttccaaatatttgcatgcactagataccaaagatggaaacacacatgatctctgccccccaaagatgttgactggtgggaagaagtgccaatataaaaatagtgttgaaaggatttagttaatactattggttgcacacaatcacacatctgacacaaactggtttaaggcagaaaaaaagatcatttataagcttatgtaaatatgcagtccaagagtaaacctgacttcagggatgtaaaccctactggatgagaatcttcatggatggggcctggaaagctgtatttttgccccatccttatttcctaccaggtaattgtaattctgttttggaaataactattttacgtagatcattcaagttgaaaattagatattacacagggaggagagagactgcaggaggagacgattattcctgaagggatgagggaatcctgaactcaggcaggagcaccccttagcacattatgggccatgatgtctgcttggtacttacaacggggctaatgctggcaccgggagctttgaaggggtgtcagcagaggaccgtgccaactgtctgtcagtaagtctaagggttcacgatccttatgaaagtggctgccacttcccttcacctaacaactatttattgtgcaactacataccaggcagtgagctaggcagtgaggacacacaggttcacaggcaaagagcctctcttcatgaagcttacattctagacaggagatagtcagtaaacaatcagaaaaacaagcgcgctactgactgtgttaagttctctaaagagaaaaaccccttcactctatagttcctagtgcaggctgacattgaatgggatagaggaaaggccttcgagttgacaacttagtggagaactgagaggtgggaatgaagtagtggtttgcaaggctggagtatgagccttccaaggagaggcaatagcaagtgcaaaggccctgcagtgggagggaaccaagtggggtgaagacacaggaaggatcaagtatggccagagatcagtgagaaggaaagagtagagtaggataagtctgaagaggctggcaagagccagtttatgggaaatcttgtaggccctgaaagtttggattttattccacacacaacaaagtgtttgctttaaaaggaatctcctgactactgtgtggagaaagtataaaattaagtttggggctagatggaccccaagatccctgtctggccccaataacccatggcaaactccatggggtcctcagaagtcctcttagtaactgtggctcctatgtcaatgatgcttaatagaagtatccgcaaaaacagaaatgttctgtatctgcatacaagtggctcttgaactggaaatgtggctagcgtgactgcagaactggatgttaaattttattctatatagactaatttatttacgtttatatagccacacgtggcgaatggctattatattggacagcacaaggcaacactgagcaccgaatgcctgaggatttctactccaaatcctgaaggcacgcccttccccgaatgttgggagagtgcgaggatatgctgacccccaaacgcaaatccccctctgtgcatttagtcttgccaagatggagagtctcaggcgggcattctgagctgcttcttgtcactggggaaaaccacgtgcacgcagtgctgaggcgccccacgcgcgtcctcaggggaagccaggcactgagaacaaaggttgtgggaccgctctttgaggaactcaccagctccgcgagctcgcggccgccagcgcggtccacccattggcgggagaggactcacagaccgcagctcctcaccccgcctgctccgcagcgggaccgcgtagacctcagctccccgagcagcgcaggtgggccagggaaggagaggaccgaggcaagccaccacgcgggattaggggtacggggacccctcgccgcgcagtcgcctctttttcacagggatgggggcaggggtggcgccggctgtcacccgcaccggatctgcttccagggcttggtttcgctttgcctggctcttggctaggcctggcgccccgcgcggagccgagcaggtggcagccgaggagtggcgggggctggaacatttaaccctttgggagcacctgccctctcccagagggcgcgtccccggatcaggcccggtgccccgcagcgcgcgtgggtcctggctggctggaaggaggccctgaccttgctttctctcccgtgccaggtctgccaaggaccatgggtgccgcgctggggacaggcacgcggctggctccctggccgggccgggcctgcggcgccctcccgcgctggacacccaccgcgcccgcccaaggctgccactccaagcctggcccggcgcgccctgtgcccctgaagaagcgcggatacgatgtcaccaggaaccctcatctcaacaaggtaatgggccagagggcaggacggcccgcgttgcgatcccgtggctgccggaaaattgcgccccgccccctggacccagaaaggatcctccc

SEQ ID NO: 12744 - DNA, 2788 bp, Homo sapiens
tcagcttctacctgcacttctgatctcagcatgatcagcctctcctgctggaagcactccctcaactctcagctgaggtcaaatttcagtttccctctcataagctcacagaatcatgtgcctcttagtaaagttcagcaccgttgcaatttttccaacacttgttttattccttttgtgctccacttaattttaaactcatgaagctgaaggctgagcttgttacattcaccaccagcagtgcctggcaggcagggagtcctcattcatttcacagagaatggatgagtgagtgacaggtgagtgagtgatgagtgggtgaatgaaccagtaacaggaacacactagattcattgtaccctggcagaggtctagagttaactttgcctgagatgctctgttatgagctcatcaaggagcactcacttgttgaacaagcataggaccatgcatggtgcaagccagtttgtcagtctgggaatttccaatttaaaatatgatgtgttcttcaagctgaatgagggtaaactttctgtatataattataatatctaagccatttcttaaagttttgggttaggaacaaaaaacccctgaagagggaacatttgtagatttaggatttttaaaatatatttatattattttcccttggaagaacaggatgggaacagccttatagttgctaatttgtggagaaggcatcatataaaagtaagagaaaatcagaattgtgttctagagggtaaattgtggctgtcctgagagcatgttccccaggaacctaaaccgtgagcatgttcaggaacccagagtgcaacagacaattcttggccccatgaatttggtggtaagactggagacagttggaaaaaccatggagtcttgaagttcttcactctcaatgcaggcctctcttgaacaccacagactaatgtcagataaatatgcttccactattaagactattaaaacaagaaccaatgaagagaagtgagcagaaacaataagcaattgaagtgtttgaagacaagaaatttttaccattaaaaggtatgaaagtttgtagaactatgtttaaaggaaattgaaatgtgaacaagaaaaaaagactgacagaaaccatcaagataacattaaaaaataatcaaattcaatacagaaatgattaagattatcactgaaaacaaaatggaaatgaagaaagatgaaatgcttctaagagattattagtgatgtcaaggacagagctgaagaagttacatagaatgcagcaccgaaaattaaatatgtaactttagaaagagcttaagggtggtttccagcatagtagaatatataatttttaattatatatatttatttatataaagttatttatatttatatatttaattatatatttattatataaaaatatataatataataatatagaatatagaatatatattctataatatagaatatagaatatatattatataatatagaatatagaatatatattatataatatagaatatagaatatattatatagaatatataaatatatatatttcccatttttcttatagataattgaagtttcagaaaaagaaagtagagggaataagtgattgtgatgagacattagctgagaattttccagaggtgtttcaggacctaaattctcaatttcaagaattcaaatgaatatgaaataagataaatgtttatattataatgagattgtggaacataagtgacaaatagatgattctaaaagctgtcaaaaagaaaagataaatctctcctagtggaatagactgaaaaaatcaatgaaagaaagaggatcagaaataaccatttagtcggaattataatccccattcattaaacactgagatggaggaaaatatatttacaagtggaaaaattaaaaaaaaagactatgagttttccaataaggtatcttttctgaattatagtcaacaaaggtgggaagtggtcccagaagaaaggcatgaggtgcagcttgtgagggaacccatgtgttgggacagccccgttgggcacgtgtgactgggggatggaggaggctggggcatcaatggggatggcataggggaccctgacttgcagaaaagacaatgagctcatcccttggtgccttgtgttgggggcgctgttggcacatcctagagaacatgcccagcagacagaggagcgcctgtgtggtgaggagataaactcagaaatgcagcatgaggcctgtagctccagacagctctagagcacaaagtgaagaccgatgcattgatgttgtttaaaaggagctaataaatatctaaagcagtcatccaagtgtgttctaatataaatcctgtgttcctgaggttgtggggattgagagaggaagtgatgtcactgtgggtactgttctgtgtcaggacaaggacgtccctcctcctctgctcctgctcacagtgaccctgatctggtaaagctcccatcctgccctgactctgtcatgggcaccaggctcctctgctgggcagccctgtgcctcctgggggcaggtgagtcctcagacaccaaccagtctcattctgtgtgtctgtatgtgtgtgtgtgtgtgtgatgagtacaactgttttcctcatcctgttctcaacttgtgtctccgcagatcacacaggtgctggagtctcccagacccccagtaacaaggtcacagagaagggaaaatatgtagagctcaggtgtgatccaatttcaggtcatactgccctttactggtaccg

SEQ ID NO: 12745 - DNA, 2782 bp, Homo sapiens
agctctgcacttcttgtccaaatccccccactcccctcttgctgggggtgagggtgacttggatgccctcctagtctctgtgcctctccctccctccagcttcatatatgaaaagacaaaggctgcacacgaggagggtctcttactctcttcaaggcccaggagctgaggaaggaaatggaggaggaaattactccccttctgggtgctgggtgaaagtgaaagatagggagggggccctcagtgagtcacgcaggcgggcaggaggcaggcaggctccaggagcacaggggctggggagctgcggaagcctgcagaggagcgatagcctgggaggggcattcctggtgctgggggtgggccgaactgcaaactgggtatagtcgggaccctgtgcccgcccagccctgccctccgctgctgctggctggtttcctgggagcggctggggttgctaacaatgacctgtagcatctagggcctgagatttcctcttcagagccgcccgagctgttttcccctcttcctagggaccagaatcttactggggaaagaggtgggctatgtagctcccacccccaccaacttcccaggaaaaaaacaaaacccaaacatcactctgagggaaagaaaagtcttgaaaaatacatgcaagcagctatgctataaaatacaggtctagattctgttctgtagcgactgctttaaaaaatcaagttacgaaacaaaaatggaaaaactgtgtacttaagtcatgacattatcgtggagaaaccttctggaactgagttctagcaatctgcaccctctacgatctgagttacactatttgccaggggctcttcggcagtggaaggggcaggggtcaggcaggggcggggtcagctgctgaccagctcttggcctggatcctgcctccaccctgccagggttgcaaaacaggttctgtgctagtttgggaaagactctggcagccacagccccacccagcagctcttcccaggggtggggctaggactgcacacacccttctggggccttacctgcaggccttggtgagcctgaccctgggcccctgactctacaagggtctgttggagctcctgactctggggctgcacaggaggagtggccacgtcgggaatgaccctgtcctctccacttcccgagcctgagatgtgcttggagtgtcagaggaggcactggctggacaaagatccttctgggtctggtgggaggctcctgcatagacagatgtgtgccaggaggactaggcctggctgcccagggggctagggcctgggtaagaggagaggggagccagtgtggcttttgctgcctctttctcagctgggctggaggggcttgggctggatgtcagctccacctgtgccttagaatgtgcctatgcagtgcacaaataacacagacagatgcaggcagtcctggagcggaaccaggagggtgaggtggtgggacaagagagtcacagtgccctgggagatgcagctgattctcctgccctcctggcagctccccaaaagtcctggctcctgcctcaccaatgctgctctgtgacttggggcctgtccctgtgatatgaggtggtgggaccgaaggcccttggagccccttttcttacacttgtgctgatgttcggggcatcctgggaggctgtggctgacactgtcactgctcttccctctgcaggtgccagaaccctgtggagcatcatgaactgggaagagtagctgagccccagagcctctctggaagagaaaggaagagccagcagttctttctcccagtgtccgacctcactgtccagcgtcttcctctgcccctgctctgccctccctggctcctggactagagcccggcttccagcaggacgtttccccaggggatgggcgactgttgaaggggatctcaccgccagggctcagttggccacatcatgaacctccaggcccagcccaaggctcagaacaagcggaagcgttgcctcttcgggggccaggaaccagctcccaaggagcagccccctcccctgcagcccccccagcagtccatcagagtgaaggaggagcagtacctcgggcacgagggtccaggaggggcagtctccacctctcagcctgtggaactgccccctcctagcagcctggccctgctgaactctgtggtatatgggcctgagcggacctcagcagccatgctgtcccagcaggtggcctcagtaaagtggcccaactctgtgatggctccagggcggggcccggagcgtggaggaggtgggggtgtcagtgacagcagctggcagcagcagccaggccagcctccaccccattcaacatggaactgccacagtctgtccctctacagtgcaaccaaggggagcccgcatcctggagtgggagtcccgacttactataaccaccctgaggcactgaagcgggagaaagcggggggcccacagctggaccgctatgtgcgaccaatgatgccacagaaggtgcagctggaggtagggcggccccaggcacccctgaattctttccacgcagccaagaaacccccaaaccagtcactgcccctgcaacccttccagctggcattcggccaccaggtgaaccggcaggtcttccggcagggcccaccgcccccaaacccggtggctgccttccctccacagaagcagcagcagcagcagcaaccacagcagcagcagcagcagcagcaggcagccctaccccagatgccgctctttgagaacttctat

SEQ ID NO: 12746 - DNA, 2770 bp, Homo sapiens
aacgggaatgtgtgtatgaatcctccctggaatctggttacagtttatgctcccaatcagtaaggtcagagtggggcctgagcctctgcatttccaacaagctccctggtgatgctgatactcccagtccattgaccacactttggataggaagagtctacacttgctctactcaacttctctccattctgtcctcaaacacaccacgcttccttccccaccagctggagggggctctgctcccaggccccagaggtcaaggcagacacagttaaggtgtggaaacctccttattgcccgatggatcctccagagaggcggtcccttactttcagcagggcgcgtgtctacctgtttcatgctgtctcacacacagggtgccacccctgtgctgggcactgggtaagtgctctgtacatattaattaggagtactcatttcaaaaatatgtgtgcctttgataaataaaaacagtatgtgcatgttgtgttggtgtgtgcttccttgattattactgaagttaaacatgttttcatccatgtattgaccatttctctttgtccttcaatgaaacctctgctgatttccttcgctcatttttttcctgtgtcttcgtctgatgagtttctcttctttttgtttgttcgtttgtttgttttgagacagtctcgctcagtggcccggctggagtgcagtggtatgatctcagctcactgaaacctctgcctccaaggttcaagtgattctcctgtctcagcctcccgagtgtgccaccgcacccagctaatttttgtatttttagtagagacggggcttcaccgtgttgcccaggctggtctcaaactcctgacctcaactgatccgcccatctctgcctcccaaagtacagggattacaggcgtgaaccaccacaccccacctgtctgatgggtttctaagaacatcttaaaggacattacttccttctgacgtatcttttaccgagatccttcccagttttttgcttaaggttaatccattttttcctccacaaagtaaccttgtatatgtattggttttttctttgttgagttctcccactgttctgaggcttagaaagtcctttcatacccagacatcagagaaacagatcccgtgagagtaactgggattgcaggtgtgggccagcatgccctgttatcactccctttctctgagtcagcttttctctctcagtctcgtctactcctcgaactcaggaaatgtcactacaggtggccccagctcccgtttacctccccatagggagctcctctctccagttccagtttcaaaactcccaaggaagcattctggttcactcgcttgggccactggccagagggatgggatactctgaaagattcagctagagtcccgggcccagccctggaccatcactgtgccccctggtgagatgccagggctgggattcagggagaagaaaggaggttcccggacagtcattcctgcctcccgcggctgcgggctccctgcccccatcctgtgcacgaagtgggagctcccgctgtctggcagctcccgctgtctggcagcagctgctctgcaggggacagtctggacggcagaaagttcatccttaaccccagccttccagtcaaggttcccaccagtttgggacacctgcaagtgtcacatcccactgggtgaaactctaagatcccttttaggggatcccattcgctccctcccttccgccaccatgcagcgccgagaaacagagctctgaacgaaccctcagatgtccgtgcgctggggcctttccaggacggcggcgcccagtcgtttctgggtcagggcgacgcctggaactgggcagggtccctggcaccgggatcccgaaaagcagacctgcttctccctgtccagccggttccccttccccttgcagtcggccccctgcatccgcgtcctccctgccagtcgagggtccccagctccaactccaccctcccagctgtgcgttcatagcgaccgccctccctgtagggacgcacggatctggtggtggagtcttggccggcaggactggacaggaaccgaaggggcgaggcgggtccgggggtggtgcgctccaattgggtgctgtccccagggggtggggcctgatcccctatttcccggcgcgccgggatcctgccacagctgctgcccacaccgcgctcagcgccttcactgccatccccgctgtccttgccgcccccgccatgggcctagagctgtttcttgacctggtgtcccagcccagccgcgccgtctacatcttcgccaagaagaatggcatccccttagagctgcgcaccgtggatttggtcaaaggtgggcccagcccgtttccccgcgtgtccacaaacccagtgcacccccaggcccccgccctgctctgccctgagcgtctcgccgcccgcacagccccctcacctcctcctgcagcgtctgccaccagagaatgctgtggactgagtggccttgaagggatcacagcctctctgaaccttagcttgccttctgaaaaggaggataacgttaccttctgctctgtagggatggaaagaaaatactgaatggagttgacagagttcttgcgtggaatgcacgcatataaattcacaaagcccagaagacctcgggaagaaggacatactgttgtgagaattaagagatgggaagagatgagccaccccagtttgcctcccctcccctggcccaccagagtccggctagaaaactt

SEQ ID NO: 12747 - DNA, 2767 bp, Homo sapiens
taactggggactcctgctgattacaaactgatcacttttctttactggacaggactaggcttcatcccctctggggtttggggatggtgcttctgactctcctgaggcagtctgaccctggtccctgcctggctgtctcctctgactcaagactctgatccttcagtgtttgtgggttcagagcagagcctgggaatgagcccgctggggagcaggacactgactccaccataggacagggctcaggatcattggttaatggtttgtaaaatggaccaggcctcatccagatgctgtccccagcccctatgaaaacatggaaagtttccactggtgcacaaacactagtgcttgcctccctttcctgatcaaccgtcggactcacatgggctgtttgtgaaaatgcctgtcccaggccatactcaggctgaccaaggtggtctggtctccagggaagggccgtgaaatgtatttttaggaagtggtccaaaggactcttctgatccagatcatcaggaagcatggcgtggatggaagaaactggcacttggcatctggtgcctctgtgtggctgtagaagctacagaaatgtcttctgcagtgactgcagcgtggccctggctgagctggtgcttgtgaggaagcctctgcttgtgtgcaggggtgaacagcagctcaccccttcccatgcacagtcctcaccttactaccttcacccttactggaagcatctcttgacttctctttggccagccagaccctcccagctccctgtgctccccatttaaacaccttccctccctgagcttagcccatggctgggtggggaggcgtgagcactgtttgcatttggtcagggcctagaagggatcaaggaggcctcatgaggaccatgtcatagccccaccctcactccccacccctgacctgagcaaacctgtttggctggattgatgatggagaggcaggcagtgaccagaccaagagacgccttggatggtggagaataggtgaccctctgttgggtaaaagaggactcaagccctcacacagtgagttggctaactttttgtctcaacagtgggcgggggtagctgtctgcctcctggagctggcccttcctgggtcaaaatgcagaaggagatggtgagaagaaccacaccagagaggctggagtaggccagcctggcttgggaccgagtcccgagtccctggctggaccctcggttttcccttccgtggcagggctcacctggatccttaatgccgcccttggaggagttaggaggatcctggatgagaaaactcaccctcaggatgattgccccagggagcagcttcctgctttctggtggaagggaggggcagacagtgggtgtgtcctgctccagtgtctaggcaggagagtttgtgaagctgaccggacacctgtggctcttatttcctaggtggcccgaggcagccgggatgacagctctccccaggaatcctgctgcctgctgagaaacatggtcagcaagtcccgtgagtgtcatccgagggctcccccaccctggaggacaggcctcagaagccgtcttcagcaggatcctgggacctctgggggctgtggagggacagacagggagccaggggcccttctcttcatcttgaaggacagtgggtacaatcagggtcaagccctcagccagggccaggagagggccagagactgcttctgttgagttaggggtcggagggactcagaagggggcaggtgggaaggtggacgggggttgtacctgcctgttgctgcctctagctcctctctgcatgtgtcctgcaggctggaagctcctggccatgttggctctggtcctggtcgtcatggtgtggtattccatctcccgggaagacaggtacatcgagctgtgagttcaccttccatgtccttccagtggctcttgtcagggacagggcttagggatggagcatcatggagcgggggacctagtagggcaggaaggttccaagagccggcacatgacctcatcccttcagctgctggtacggagtgtttccatgagggtgggtgggggtagggcctgggatgtctcactgggccctcacccagggagtgcaggggcaggaagacctggatcctcaaggacttgggttccaagtggaacttaacttgagatgattcctccccggcaccttgggaccttcatgccgtgggagaaggcttaggctgcctggaacatgggtccctgggtctgactggggcttctgcctcctgtccttttttctctccagtttttattttcccatcccagagaagaaggagccgtgcctccagggtgaggcagagagcaaggcctctaagctctttggcaagtaagtacttaaggatgaggagggtagagcagggcatggagcgagctgggattgagggtttcacagtgtggggagtagatggaaagagcagctgtgttggtggacatgggttaggtgaagccagggagggaagagaaggccttataatattagtcatgggcctaaccctacttctggcatcaagattaattctgttctcatccccacccggctttcacctctgtgcagctactcccgggatcagcccatcttcctgcggcttgaggattatttctgggtcaagacgccatctgcttacgagctgccctatgggaccaaggggagtggtaagttcctacccggctcgtgggaaccatgggctcaccctgaccacgttgcttcctattctctg

SEQ ID NO: 12748 - DNA, 2766 bp, Homo sapiens
ttcactaggaagagacaccagccttgcaaggggagcctgggtgtgcagacagcaagagccgcccaggccaaggagaatgtgaacgaggtttggtcttttgagtggagagtgtggctgctgtgaggaagaaggagcttgttggaaaccacttagctgagcctagggacttgccagcttcctggaaagtgagagcccaggagaagaagtctccctgtccctgggcttccagcccctccagagcccccactggagaggggcgtgctgaggccagagcccggggtgacgaccgtgctgggtgggccctggggcgcactccgccatcactctgtgttccgggttcccagatgctgcttcctgggaggagcagcccagtcgcatagggagccacggggccctgcagctgagctgaccagcctccctgtgtgtgtggctggatttgagccacgttacctttatcggggcagctcaggttggggattgattgacagggaaaggaaaggcctttacacttggtctaaatttaggcaagcagccagaaaatgggatattcccgtgggtgcgggagtcttgcacctcagtcctgagcctgagcagtgtgagtctcagagcatcctgcacagtgaccagcatgcggacggcagcgggagcctcgtggaagaagcggcacagattttgaagagacacagactttgaaagaaatgcaagacgcgcaggtgcggagcgtctcccagccccgcacggccatgtcctgctgaggttggatagaaacatttgagaagaaggtcgagaacttggcaaggcaaagcaaacgggagtggacgtgtcgcatagcacacagggaagcagcctaaaaaccctcggatttggaggaggctgtttctaatacacagatttggaatgaagttgtaagaaatgcgttacagtggaggccgctgggtaacagcagcagggatggggggtggttggggagcggcctgggggacacagagggggctgggggcagagacgagggaccagcttctctgtccaggttcgtcttggctggagttggagactctggtcctgagtggtctctgccttctccctactgagcccaggggctcttgagcaggttgtgactaacccatgggcagcttccacgttcagggcctgtccgacattccagccctatgaccctgctcctaggcgagtgctgtccaggcccccgacaccatcaggcccttgtggtggcctgtccacacccaggccccccacttcccccctgcacaggtgaggaagttgaggctcagggcagctgagcccgcttttgtctgctcggagcctgttgttccagccctagcctggccagacagagccttggcccctgtgttggtcttgctttgttctcaccgtggggggatgctggacacagagtccccttgttcttgttctcggtgagacctggtcctgggccaccccggatgtttccctgggctcctgcctgctgtgatgtggggcatggagttgtaccccagtgggcgacatcccaggttgtggcacctgctgtctttctgcagagtgagccgcaacagctccacctgggtgcaggtttctcccctgttcacggttcagtgaaggatgctcatgctgtcactgattgcagcagcctcaggcagaagtttatggtatctccatcagcccaagctcccagtgtaacccttgggagagatttgctggaagaaagccgcatggtacctgctcattccggcctctcctggtgggaaggagggatgtggccccgggtgttctcaggagtgctggctgttcagttacgttgacttgcgaagctattacatgaaggtgtgaggttttaatggtcaagtgcagggtggtgatgaatgggttaaagacgtcaaggaaggatctgaatcccggcctcggaggtgggcaggcttgggagacctttgaaaaaccctgctgtggtttatagctgtaaggctttctatgtggggtttaaagtttgtcatttgtattttcttaggaaattatttatgttgtttccagaatttcacatcctggaacctgagagtggtatcagtaacaccatgtaggctgcggggctggagctggggctccactgggaggctgtcgtggcggggtgggaggaggtgccgcctctcccatgtcagagcctcggcggctgctggtcctcgatgcttctggggtcagctgtcaccacccccaagaaccggctgggccagctgcccccagtcaacgtcttgcctgcccgggactgctgagtgaggcctgggctctggtccaggctttgtagaccgtgcaggcggctgcatccccgacctgacccaggcctgctcgctctggtgtgcaccgacctgccagctttgtggcactttgtggcatggggctcaggccgatggaggtcagtggctgtaacactgttgagacctgaagaccgtttacggtgtatgttttcgggaaaggtctcttaccacgtaccgaagtggaaatgtttgagttgtttgaaaaagatgaaatacttgtgagtggtttcaatgatttagcgtggtgttgcctgggtagaccgtcaggaagtcagtgtgacgtggaagtcctcggcgagccatgtctgtggtgtgtggcttgctcaccacctgcctcagggctcggggttcatgagtgtaaatgtctgtggatgtgattattgaacttggtgaaatgcctttgttcattcaaattcttctttttcccccatttccactttcttat

SEQ ID NO: 12749 - DNA, 2759 bp, Homo sapiens
gatggagttttgttcttgatgcccaggctggactgcaatggtgccatctctgctcactgcaatctccgcctcccaggttcaagcgattctcctgcctcagcctcctgagtagctggaattacaggcatgcaccaccatgcccagctaatttttgtacttttagtagagacggggtttctccatgttggtcaggctggtctcgagctcccaacctcaggtgatctgcccgcctcggcctcccaaagtgaagtgctgggattacaggtgtgagccagtgagccgggcctatttgagtttttatgtttaaggatgtatttctcttactattttttttaacacagggtttttcctgaaaagttgcctgaggaacaaagagttaaataagacccttaaaggatcaactctctttgccaggcatctaagtcccctctggggctttgaggagacagtcgctgtctttcctggtggtaccaccaccttccttcattcaacgccgccgcatctgacaaccctgggcacaggaatctgcaccccaggtctccacggtgaatccagcagtcaattttcagagcttgtcctgcctgccccatccacaccgcttggcacatgggtcagcccgcctttacttaccttcttcatctggcttcccggatgtcacatctcttggtttttggttggtttttccagttggcttttccaatttatacctgcagcatggatctctcctctgaactccagatacataaatctgtctatttgacattgccttggatgtctagaaggcatttcaaacttagcaggtcccacacttagctcctaattgtcagtcctgcctccagcacacgcccctctcggtgttccccatcgcagtcgaggacaactgcattcttctagtttctcaggcctcaaaccttagaatcatccgagactcctgtctctcacatatctcatctgtcaacgaatcccatcagctctaccttcaaaatatgtccagaatccaccacctccactgctaacacctggctcactatctcctagtaacctggagggcactgtcttcagtctgatcttcacacagtagccgcagtatgaagacacagggtagaccatgcctctcttcttctccaaactctccagtgggttcctcctagtcaaagtcaaacctcacttggccctctagacctcacctctgcatcctcccgctggccttatctcctccacctctgacccttgctagctctatttcagctccaccggtctcctggccattccctgaacctgaaacatggtctcctaccccagggcctgtgcactggctctcccggtgaggaaaccgctctccttcccatctccaccggcgcgttgcatccttcacctctttgctcacatatccctttctcagagaagcttttactgaggcctctgctcaccctcttctcccctccacattccgtgtcttccttttctatttcgtttctctctatggtacttatggcttatgtaacaaactaatctattgtttatatatttatttttactgtttctctgtgaaaacgtacactcgaaaagggcaggagttttgtctgtttggatcaggctccacccctggaaggtaggacagtgttcagcacagcaggtgctcaataggtgttgtttcgtgaatcagcacatcaattgcagcattgtggctaccagggggtcaggatgcgggcggtggagccctctggcctttgtgtggtagccgaggactctgtgtcagcgaccgttttccgggaaacttccgggcgagactcacatcttggaaattcaaatactcaatagctctcgaattctaggaatcttgagaagaggcctggattaaggattcagacgtgggccctcagatgggtgagaaacggggactctgtgtctcctagcggggacagaagggccaggtgacaggccaggcagagtggacggggcttgggcagggggcgggggcaggcagccacacggggcaggagctgcagagctaaagccaggccatgtggactggctgcgggtttcgctgcctagctggtggcattgagcaagttacttaacctttctgaacttccgttttatgattttggaggaaacagtcatagctttctctctggcagagtccgatggcccgagtcccgctccacagtgcgggtggagggcacggaggggtgtgtgtggggggcgacagcccaggaagactagggggcggcagggcgcgtgggggcgggggttgggagaccgcagggaggatccccgaccttgtctgaagatccaagcaggcggagccgcggtctggtccgcggggtaggcggggcgcaagagtgttcccgggggcggggggccgacccgcgtctaaaggtttccgcgattcacccgccggcgcctggcctggcccagttgcaccacgagcgctgcggacactcggggcggcagtcggtctgtcagtcctcccgccaggtcccgcggcccgcacctgccgcccgcacctgcagctccgcacctgcggccagtgcctactgccctctcttgccgcccgcacctgcagccccgcacctgccgcttgcacctgcagccccgcgctctacccggttcaagcatggctgaccaggcgcccttcgacacggacgtcaacaccctgacccgcttcgtcatggaggagggcaggaaggcccgcggcacgggcgagttgacccagctgctcaactcgctctgcacagcagtcaaagccatctctt

SEQ ID NO: 12750 - DNA, 2756 bp, Homo sapiens
gatgggaattggaactttgacacagataagatcatccagcaagtggatctagacatgagagtctacctgtactgcacagcatggtggccacctaccacgttgccactgagcacttaaaatgctgctagttcaggccgggcgcggtggctcacgcctgtaatcccagcactttgggaggccgaggcaggcggatcatgaggtcaggagatcgagaccatcccggctaacaaggtgaaaccctgtctctactaaaaatacaaaaaattagccaggcgtggtggtgtgcacctgtagtcccagctactcgggaggctgaggcaggagaatggcgtgaacccaggagatggagcttgcagtgagcggaaatggtgccactgcactccagcctgggcgacagagcaacactccatctcaaaaaaaaaaaaaaaaatgctgctagtccaaattgagttatgccataatttagaatacacactgaattacaaaaacttaatacaaaaatactaaagtttctcaataatgttatatttattgttgaaatgataatttttatatagagttaaataaaaacatcattaagattgattgttacctgtttctttttactttttaaaatgtggctactagaaaatttaaaattacgtgagtgactattggaaatgtaaattgtcaaccttaaaaaaaagacactagaggctaggcatggtttctcacacctgtaatcccagcactccaggaagatcacttgaagccaggagtcagagaccagcctgggttaccaagcaagaccccctctctacaaggaattaaaaaattatctgggcgtggtggcatgtgcctgtagtcccagctactcggaggctaaggtgggaggattgcttgacccaggggaagtcaaggctgccatgaattatgatcacactgtcacagaagggctgggctcccagctaaaccccacccttaagcctggaaccatggccctaagtgaaaacagctgaccccatttttctgcccaaatgttgcttttttggcctgccccaccccatcctgtgcccatgaaagacttaagctggcaaagcaacataagcggctgagcgtcgggaacacgagcggctgagtggcaagcaaagaaacaactaagtgttagagagtagatgcagctaattttggacgtgcagcttccgagaggggcctagccagagatgggtgggcttcaggtaaagatcaccttcccaccccctttccagcctctctttccgctgagagccacccactgctcaataaagttgtctgcattcattacctttcaacccgttcatgtgacctgattcttcctggatgccagacaagaaccaggaagcccctgagagtataggggctgccaccctgaccctccactgagctggttggcacttggccatccctggaaggcagagcggacagagcattggctgtaatatgcttggatgctgctgcagggcccacatagagcctgctcccaccagaaaggagcaactggctggttccagaattcgttcactccagttcccacactcgctctctcgcacactccctcccgtgaggagtggccagcagtgggcttagtgaaaccagtcactccacttcccacccaccaagggggtcaagggaactatcccatctcatcaccactgcactccagtctcgatgacagagtgagaccttgtctcaaaaaaaagaaaaaacggccaggtgtggtggctcacacctgtaatcctagcaatttaggaggccgaggcaggtggaccatttgagatcaggagttcgagatcagcctggccaacatggtgaaaccctgtctctactaaaaatacaaaaattagccgggtgtggtggcatgtgcttgtagctccagctactcgggaggctgaggcaggagaatcacttgaacccgcaaggcagattgcagagggccgagattgcaccactgcactccagcctgggtggcagagtgagactgtgtctcaaaaaaaaagcaagagaaaattatctctaacatgttgggtttacttgggaatagaaataaggattataatccagaatgcaggaaatggcaagcctccagtgcactcagtgagggaaggggagcttttattaacaaaaaagagatttatataaactgcttagaaacagatcattgtttctagaggctcaaagccagagttgtcatttcattggtggagacaccttactgggtaagtgttctgagaacattttacctgaattacagcagtcctaaaaaatgtctagtgataaaccttatcaaatcaggagatgcttgaaggatgcggaagagctttttgaacatccttggaaacaattcttagacatataagcataggcctcctctcctttcaaccttcctggcccttttttgtctgtgtctgacaaaaccgatttcattttggcatcttcaaccttcacaaagtctagagtaagaagtatggaagttgtcagcttaaggtgcagacatggccaagtccaagaaccacaccacacacaaccagtcctgaaaatggcacagaaatggtatcaagaaaccccgatcacaaagatacgaatctcttaagggggtggaccccaagttcctgaggaacatgcgctttgccaagaagcacaacaagaagggcctaaagaagatgcaggccaacaatgccaaggccatgagtgcacgtgccgaggctatcaaggccctcgtaaagcccaaggaggttaag

SEQ ID NO: 12751 - DNA, 2756 bp, Homo sapiens
acctctccaaacccaaagtcagcccagtgtgcaagagctgggaccaagcaggtgggtcatggccacagtgaggaagctgacgtgcccagggggccctgtggttgcggggtgctggcactgatatcccggcctcgcctggctgtttgtgatgggaacagtcatctgggcacccagtgtactggcctcacatgctcctcaccccccacctcgtgcacggctgaatctcaggacccccaccagcaggtgcagggccccctcatcctccctgccagagtccttccgggaggccagaaacacgtccaagttgtgccccggggcccctctcgaggctgcccctcttctcttctcatgcaaacttctgcaaaggcccatcggtggtgaggggtggaggtgctccttcagcctgctcagcgctagacacggccttgttccccctctggggctccttggtcccctgagcttcactgggctttatttcctgtatgctgacatctaggtgctccaagaccaggcctccctgctccctactttcctcccctggacaatggccagagcctccagccagttggtctcctgtgctgtcagctgtggcctcttccagaccttcaaaggggtcagtctcgggctggccactgagggactactggtgtcagggtgaccttggaccctagtctcccggggcagtgctcagctgaacacgtccagagtagagtctatgtacagaagcagccggcctcctggcccccgctctccacggggctgctggcgtgacggcagcccaagctgtctcccggcccggagctgcctgcacggtcagctggtcagctgggccaggccaggtgggcagagagaaggctggcatgctctgccatccacagcacccctcccagtcccctgccccgccccagggacttccctcagacgggcgtgtgcggctgtgtcagggaaggtggcatggaggcaggagggagacagagccccacgcccaccccagaaccaggggctgttcctcatggaccctgggtgtgctctaccagggggctctgccagcagccggaccggggccacggagatgctgctgagctctcttctctgccccattcgaggggtgacacccagaagccccgtggggtcctcccttcttccccaaggcacccctgaccccgacctgagctggggacagcccgggagcctgcggctgagcctgcagagagccccaggtcctggggagctatgtgggccgggctccctgtgctgtttcagagtcagcagggagtagcacactcccctctggctggagaccccgagacgcccgcctaccgcaagtgtcgggtttaggacgtctcccctgagcgaagtcaggggctctgccccagccatgcctgtgtccgggagggagcaggccggtcaggcgaacctcccctaggccccagctgagcagtggggctccaggcctttacgttctggcagctcagggagctgcttggaacttggtgcagcccgggaggtggggctgggagcagccctggccctgcttctctcctccaccgccccaggtcctctcaggaggggactcccgtggggagggggtctttcaaacagcagggaagtgcgtggcctcgtggggcagcgctgaggcacctcccacaggagccgggagtgagggctggaggggtccgcatccaggaagggggagggtgctggagaccagccccaggtggaggcggtcagccggcagggcggggtgcgaggggccggtccgggcagcctccggtttagaggaaaagagaacggagggcagggctcgcccagggagggcaaggaagggagcccggctccgctggctcagtccgcggcacccctgtcccccaggacagcccccaggggccctggctcgggtgggccggcggctgtcaggggccagagccctgatggataagcgctgacggcccctctcccgcgccccgcgccgctgacacccatcacgccgcggcggggacccgggagacctggcggcctctgtgcacccccgcggcagcctgcgggcaacgggggcgggaggcgccgggcgcccctgactcggccgcacacctgcgccgcagtccgctctccgtccgctgcctcccgggttcccggccgctccaccgcgcgccccgagagctgagccggtcccggcgcacgaggccggtgagtgcgcgccagggggcggcggggggcgcgcgggcggcgggggcgcggggttcgggccgggggctgctccttccctcccgccgcgagcgcggtcggaggtcgcagcgccccccggagcccggagcccaggcgcacgcgcgcccgcctctgccgccaacttcgggaggtgcgagcggcgtcggggggacgcgggcggcggcggaggctgcgggagtcgctgccgctcgagggaccgcggacccgggaggtccggctcccggcgccgggcctcagtttcccccacgggagccgcatcccacccccagagccccagcgcgtccgcggggtccgagtcgcggccggcgcggggcggggaggggcgggaagtttgcgccctacacgcggcctcgcagacttggcggctccgctcccggccgggcgcaggtaggagcggcgggagccgcgggggcggccagttgggcgtcgcggggccggctggacgcggggcgcgggggcagcgggtggccaggcgtgtggggggcgcggggggcggccgggtcccccccaccctcttctcgaagtccagg

SEQ ID NO: 12752 - DNA, 2755 bp, Homo sapiens
gtgtgtgtgtttgtgtgtgtgctctcacacaaagggggatgcggccggggggcgccgttgagagaggaggttaattccgcgcgagtggcgcggggggctgcttgtgttccagggggagctgttcacgcggtccccggccccgctctgaagtctcccaactcacccggcttgtctcccgcccccgccttactggggagagggaggcccttggtgaaaggcatgggagccccgctgccgacggggagagatggggcgccccccctccgccccgtcggagagctgagaaacttgctgggaaggttctgggctgagggtggcctcttttggttgggcgccgttggggaggggccggggccgctctgagcgcggtctcatgcccccgccccctcccctgtcttgtcttcgcgggctccaggctccccatcaacccgggcagccgggatttaaattcacggtggctgagtcttgtgacaggatcaaagacgaattccagttcctgcaagctcagtatcacaggtaaggccggtgggggccgccccggggctggcggggaggggtgggtcccctgcgcggctcctgccatcccccgcggggacggagggggctcccgacctaggggcggcggggcagcccgggcctccgccttttgtttcccctttccgagcgcgccgccttaaccctttactgcccgcagcagcccggctcccagcgccgcccgtggggtccccgaatgagggtctaggtcgcggcgagcgggttcactccgggttctgggtgtcgggagccagcgtcagggtcctactcccctgctgccgtgataagtcctttggctcgcgggaagtttcgaattgtttcacatccccctccccacggcggggacccaaatccccccgcgtccccaggctgtgggataatgggggcgcccccgggggggtgtcaggaaagtggaaaagtggctctagaggcccttgggtcggggcctcagaggaggctgtccaggcgccacgcctgagccggctcctcctgccctcgcagcctcaaagtggagtacgacaagctggcaaacgagaagacggagatgcagcgccattatgtgatggtgagatgcggccgcgggcctggggggcggttggggcgccgaccccggccgggggcgcggcgtggatctggggagatgagcgccaggtccccaccaccgcccagccgcagggcggccctgagagagggcataatctggtcttgccctccccttccccagcttccattgccggggccacttggaggagggtgagtgaggggaggggcagaaagagaaaccccgattccaggccggagacttctgtactatctttatgtgcctttaatttgtgttttgaaagtttcccaggggctgattgccattgccctatcttggctagtaagataggattggaccagcccatgtgaaattagggttggtaaaaatctctcttagtgacctcctgggagtgtttggaaacttttctgctttgcagctgggatctagccagagtaggacagaagccctccttccccagggtgttgtgaggagtggagaggccttgtaaagctctctctgcctccactcccctcctcagggatcccccagctgggtatcttctccacgctggggcagtaggcagactgtcttccttttgcccagcaagttttaatcttcatttgtgagagggcacggctccctgcactgctttccacataagaggccttcgacacagtgctaaataactctcagaggacaagagggtcccagtgtacacacgattccctgttgaacctgaaccttgtataaacaggatatagggcacatgtggtgcttgtgggagggaaggcccagctccccttactaccacataatataacgttctgttgagatgagaggaacgctcgcccttgtcagctcttaaaccgctctgtaagctggctttggggtttgatttaaacttctttagcaaatgtatcgtaaaagtatgatttggccaaaacctttccaagaaaaaactgattttgaaaaatgaccagatttctgtgttgtctgttaatagccattctttttacttttagtactatgagatgtcctatggcttgaacattgaaatgcacaagcaggtaagtgcttttctcttttaaaaatatatttcattttttaaaaacttatatatgtggacttcttatgttctctcttgtttgaaagtgagcctgcttcttcgattcctcccccttctccttgaagagtgaatggatccagtccttgaaatgcaaggtctgaggctttgctgatttttttttagacatgttgagcttttagcatttgagcttgtgaaattagtcctggtcttggatctcggtggaggataaaggaccaaagggaaagttgtacctccaggatctgctttacaaactcctgaaagcccagaggtggctggctgcttttatctgttttaatgtaaaattctcaagaggaaatgcaggaggattttttttttctttctccttttttttttctttttgcagaaatgtgatgttctgccttgataagattaaacttcaagaaccttaaaagccaggctgagctgtcgaaatttaagggaacgaagccactaactgcttaaaaatatgaagccagaatgaaatacaacttcagtgccttgcattgacaaggtggctttctcatccctgtcttgatttgaaggcagccgagttcccattttacagagaa

SEQ ID NO: 12753 - DNA, 2751 bp, Homo sapiens
ggtgcagtaactgttggggtttaataatgtatatgtaaagcttcaaatcagcacatttttattcttatcctttaataaacatattctacatggaagtcaacttgacttggagaactttaagaatcctatagttgcccccagagcatgtggtctcaggaacacacatcagttgagagtaagctcctcacaactctggaatcttccaagcttgctttgaatgcattcctgtctccaccgtccagcattcatatttctgcatttatttttattattattttgtgtgtgtgacagagtctctctctgtcgcccaggctggagtgcagcggcaagatgtcggttcactgccacctccacctcccgggttcaagcaattctcctgcctcagcctcctgagtacttgggactataggtgtgcacccaccacgtccggctaatttttgtatttttttttttagtagggacgggtttcaccatgttggccaggctggccttgaactcctgatctcaggtggttctcccactttggcctcccaaattacagacgtgagccaccggcccagctgtatttctgtgtttaaacagtagagtgaaatcaactatgaacgcagaatgatgggaaagatgacgataagggtatttcaattttgtcattttacgaaactacttggagttttgatttgtatttacagtttttaaaagagtaaaacagtgtgaactgtgaatggtaatgattttgtttggtaagtgcaaattttaattcatacatgaaaaatatttgttttgtttcatgattattactgaaaataattttgtactatgaaggaagaggggtgttaaaaatgatccactgtggatgtaaattattctaggcatgcttctgactaaaacattagcatttccacaagaatcccaaaaaataaaacaaaatttaaaagatcccttctgtttcttttcctccaagtttccagacccccatctccaccctggccacctcttcctgccataaataatcaaatcccacactttcatcttcaccttccgtttccattgcctcttccgatgggacagcacccgtggggaatctcctccatgctcacaatccccgtcttgccactatatcaagtcacacttcttcctcaccaatcgcccattctggaacctctgctatccagctagatcactttgaggtttggacaactactggtggaggtaatgggggccccagacagcccttgacatcacctcttttatctttgccaaattctacaaacaaagcccatgtctttctgtcccccgcccccatggctggcacatagtagatgtccccaaatcttggtgatgtgaacttgtgtgtctcacccttcacagacatcaccatttcccgttgcacagaaggctccactcataccaggcgctttggctcccagaataagcaggctatcatgctatgtccgacatctaggcgttggtacgtactgttcccttggcctggaacattctgccctctctcaccctctcttttcttggctttctgaaatggcacctccatcagaaagtgtccctcactcttggtctgagcaagggaccttgcctggtattcctgaacttccacctgttttccctctgttttctccctctctgggccttgtcctcaggtcagtgttgtgcctccagctcctgcagaggcgaactcagaggcggccgaatgaaaccaaatggatttggcttgaccccatcatctagcggtgcccagcaagcgctggcacatagtaggtccagcctgcccggactcgcccaccacgggcccccttccagagccgggaggcaggccaagggaggccccttattgccaagagcaaacaggccgcccagggaagttttgctctgggtcacacccacctctgggtggctgccaatctgcctgccagaaaccgcaggctgggccgcggctacccagagtcagggccacggagcttaggagaccttgggtcagctctgcaaaggggttgtttactgaatgcttctggtatctgcagccccgctggggttcggacagggggtctggaatagggcttcacaactacagcagggctaggaccctcttgggctggaaggagctggagaggcctctgcaagctgtcacaggctcttggtgctggcactggctcaggctttcacacacacacacgcgcacacacacacacacacacacacggacaggcacccccttggtggccttcacagtttcaccttcaggtaaatgggctcatcctttgagccatgaggatgggaagcgaagcaaggaatgaaaaagctagtgtgtttgtgtgtgtgtgtgtgtgtgtgtgtgtgtgtgagcgcgcgcgcgcgcgcgcgtgtgtactcgtgcgtgtgcctgtgtgtgcctgggagtgacctcacagctgccggaacataaagactcacaggtccgcctcccaggctcaaagctggctctgcaggggacatgagaggcacaccgaagacccacctcctggccttctccctcctctgcctcctctcaaaggtaaggaggcccgggccctggaatgcactgctgactatttgggtgtggagggggtggggatgtaaaatcgcagccaaggacccccttggcagaattcctccagggccccacattgggcacagtctggcccccatgcctaagcagggcttctctccctggaactcagagctgcctccggccagccctgctgtgtgacctcagatatg

SEQ ID NO: 12754 - DNA, 2743 bp, Homo sapiens
ggccacaaccagaagttaagacaataaataaataaataaataaataaataaataaataaataaaacagaacaaaataagctatacaaaatacaaaatgtttgtttaggtatgtttgtgtgtacttacgcagaggaaggggaaagtctagggaagtggcgaagagagaggcaaagctgactacattatctgcgtggcccattgcaaaatacaaatgtgagactccttgattaaaaattatgaagaagaacaaaacagcgacagtagactattgtcccagaatattaaaccaaacacgggtcttatgagctgtggcctatacaactgcatagtcgcacacccatgaagcccaccctggttggaggggagaattataattcatctccagcgaatgtaaagcaatccccaccctgccaaaacaacagtaaaaataaacggcgatccaaattagggcaggttgtgcccaatcctgatggctgtgcttgtgatgacggtggcggtgctgaggtggacttgggggcactgctcctatataacagactttagattgatagaggagaaggaaaatagtttctgaagctccaaagtagaaacttcaggcgcaaagaataaggtaaaggaaaggagaccgcatcagacctccctcctgcccttgggcagtcaatgccttttctttccaaagcgaccctctccttagatcactgtgtatatccggtgccttaggagctggggtggagtacgtaggtttggctgtaagggcgcgtcagagcgacaaaaagggtagagacaagtttaaacccctttctgtggagtggcttcctaccctctttggccacaaaccccagggctcccagaggggcctggatgtaagtgggttccagatgacccatcctcccttgaccctccgaaggtaagacccaaggggaaccgctgtgatcagcattcttgaattcctcaaaagtcacctcacttgtagaagtgcgtagtcctccagcatttggaagaggtggcagggaccttggggcccgggaagttcgcgaccccaggaagcgggtctgaggcggtgcaccccatccactccgtccgcagtcggggcggggcagcgggacccgagaggacgggaatccctgcagggagggaagggccgcgcctgccgaggcggctccgagccccgccactcggtcctatcccggctcgcggaggctcaggccccgggaactgcgggcggagggggcggcgaccgggcaccctgcggccactgcggccgctgctcctgcgactcccgcgcccgccgggtggtggctccccagtgcccgcccccagctccccttccccgcccctcacgcccccttcccgccccggcccccgcccggcgctcgggccgcgccgacccgtcgccccgtccttccgagcgcgccaggcggcagattcttggcggcggcggcgcctccccagtgccggcggccccgagccggctgccgcgttccgggcctcagagtcctcccgcctcggccattttccctcctccccatctcctccccttagtcccctcccctcccgatcctcatccccttgccctcccccagcccagggacttttccggaaagtttttattttccgtctgggctctcggagaaagaagctcctggctcagcggctgcaaaactttcctgctgccgcgccgccagcccccgccctccgctgcccggccctgcgccccgccgagcgatgagcgcccctccggtcctgcggccgcccagtccgctgctgcccgtggcggcggcagctgccgcagcggccgccgcactggtcccagggtccgggcccgggcccgcgccgttcttggctcctgtcgcggccccggtcgggggcatctcgttccatctgcagatcggcctgagccgtgagccggtgctgctgctgcaggactcgtccggggactacagcctggcgcacgtccgcgagatggcttgctccattgtcgaccagaaggtaagtcgccgcaccgctgccagcccggcgcctccccgcggcgcagggggcgctgcccggctggccctctccgcgccaactttccggctcccggggctcggctggccgccagcctcgccggcgctctggaagcggctggccccgccgcggctggacgcctgcaacccgaggcgctgcgctcgctgttgctcatcctcctctcgccccatcttcctctattcaccgatttctctccagtccgccgcctcctcacccatttccatccttctcatgacatttccaggtatcttgccctttcctcgccgcgcccctccttgtccttgagacttcccagttttcttcccctctctcccctacggaccctggaccagcgcattcctggtgcaggaatcctccttcctgcaccagagtgcccccggaatgacctggagacaaggaatttctcacctgtcagataagcttttaagagagtgtgattgactcggccagttgtcaaaacaactgaccaggagtgcaggtacccaaggccttgtcatcttttagttccacttctgtatgagcatggaaacacattttccaacgacaaaacctgaaagttgcgaccttcctatttttcattcccgggatgctgatagtaggacgttgaagtggtgggggtgatgtccaggaacaccccgaggctggctgtgtccttaagtttgaggctgtggggctctggacagcggccactgaaggcaggttagaagggtcatt

SEQ ID NO: 12755 - DNA, 2732 bp, Homo sapiens
gctggtgcttaccacatcttaccacatcagggacttgtgatgcctctctaaatcttattcatgcttcaaaattcagctgaaggcctacctccttcctacctactccagtccatagtatgcacttttcattctccactctttataccttttggcacaaatcatttggcgctcggcacttcatgaagcacatcgtgtgcctttagcgtgtttctcctgtttctataggcagtctaagaaaaacgctaggtggtaagagcacgcggtgtcactgtccgtggtcctgaaacatggttgcgtgctaagattcttcttaagccaatatccggtgactcctgttcactttttcccaggaatttttaaattggtaaagtggtggggacaagaaaaaagaaagccaaaaagatattgggagagaaagatagaggcatggacagaggtatccctctccagtcattccctagagagaattaaaaatagtaggattttatgtaattttcaaacaattgcagacgcgaacttggaagcaaaaggggggagggaaaaatatcaatggcatagccattgatgaaggagaatttaaaaaatgcatgcactaagtgacataaagccatccaagtgtcggcatgaacacacgcactgatgctagtggactaggataccaaacaggtagcatgttgtgaacttagcgtcggttgtgtcatactaaacttccacagattttctttttgtttctctctcttgatttaaaacaaaacaaaattgtcatttggcactgtggcagaacaaagatgactgtaacttatatttctcatctgatgtagctgtgtacctttttcactgttagcacctctgtaacagttacattccagcaacatcgagtcccagctgccgatggctggcggcgcaaacactccctgccctagctatgtaagttccccaactacagtataacctctcagaggacgaacatttttggatatctcaaaatgcctaagtacagtgtctggtacaaactaggagccaagtaatatccactgaatcaagaaaagaatcacaatgccttccacggagaaaatattcaacaaaggcttgttaaatgagcaaatattccagttgttttaacaattccatcctcttctaggttcttttaaagtccaaatctcccttcctctcccctcgggactccacatcccaacaaacctcccttccgcggcagtcactacctttgcagcactctggccctgccctcctcctgccacgtgtcggacccctgctgggctggccctcctttcctactctgcgacacccctatcccccccgcccctatcctgcccgctcccgcacccggtccctctccccgggcctcgcgactccggcgattcagctccgggtccccgcccgcagggtaacgcggttgtcatggacacggcacctgcgccctacggcggtgccccttcgccgccgtcccctccccccacctgcggcgccgagcctgccgcgcctccagagctccgccctaccccgccccgccctttcgggcgctccccaggccgcgcgcgcccgcggccccccacccagccacccctcgatgcccggtgcctttccaggcgccgcggagccacggggaccgcgggggcgcgcgagcgagcaagcggccgcgcatgcgcactggctgcctcccctagcggcgatccgggccgctgccgctcgcgcttgggcaggacgcggggcgggcggggggaggggggagcggcttcgcttccagccccgagtgaggcggagacccaggcgggcgggcagagcaggcggcaccgcacctcggccagaggcggctgcagcagctgctgcccttgtccctgccgccgcctctccagtcccttctgtgattaccactccagctgctgggaacgggcgagaaagaggaggaggcgagaaactcccaccgacccacagaggtgagtcccgggcagagcatcctccatccctgcctgcctccctccctccccacctccctcccatcctctccatcctcccccctccccgctccccaaccctccctccctcatccttcccaacatccctctctcctctcccctcctttctcccttccagcctttctttcatccctttcttcctctctcccagccccacttccttcccaccctttctttcttccccgtcttccttgcagccactcgccctagagcacagctctgcatccctttcctcttgtctccatctcttcttcccccctttcttacctcttccccggtgggagggtgggagcatcccttgcctgctacaactgtccggattcaggggttccagaaaattgggtgcatatactgagagacacactcttaaacagcgggtgccctgcagattcctaaatttttaggatgaagggtcaagttgggtagagtactgggaactggagggagaagaggatcgaagaagaatctgtggatttgtgctatattagggtgggggtggggagggttgtcacttggacatgctgccaacagcccccatacccctcttcagcagtttctttttttcttctgggaattacatatttccagtgtgtgtctcaccaatttaaaatccagccttccctgctttgattgtctccgtgagaaaccacaacgaaaaaggagaagagaggaaaggaacaagagagaaaaaggggaggggagaggaagggaggtggcagtggaagcttgtgttctttt

SEQ ID NO: 12756 - DNA, 2732 bp, Homo sapiens
gacggggttttatcatgttagccaggatggtctcgatctcccgacctcgtgatccgcctgcctcggcctcccaaaatgctgggattacaggtgtgagtcaccgcgcccggccccgcatttagtcttaatgataatctggtaggtaggtgctattatattattactttttatagagaggaaactgaaccatagagaactaagtaagcgcccacgggcactgagctggtaagaggcagatccagggtttgaaccccccaaagacgggtgccacacgcctcttgataggaagtaaatcaaaaataaagacaaggaaggccgggcgcggtggctcacgcctgtaatcccaacactttgggaggccgaggcgggcggatcatgaggtcaggggtttgagaccatcctggccaacatggtgaaaccccatctgtactaaaaatacaaaaaattagctgggtatgatggcgggcgcctgtaatcccagctactcgggaggctgaggcagaattttttgaacccgggaggcggaggttgcagtgagccaagatcgagctactgcactccagcccaggtgacagtgagagactctgtctcaattaaaaaaaaaaaaaaaaaaaaaagacaaggaaaacctgaggcctgggcacagcgcctcacacctataatcccagaactttgggaggccaatggagtcaggatctcttaaacccaggtgttcaagaccagcctgggcaacattgcgagaccccatctctacagaaaaacaaacaaacaaacaaaaactaaaaattagccgggtgtggtggcgcctgtctgtggtcccagctactcaggaggctgaggtgggaggatcgcttgaggccaggagctcaaggctgcagtgagccgcgattgcgccactgcactccagcctgggcgtgcagatcagagcgagaccttgtctctaaaggaaaaaaaaaaagaaagaaagaaagaaaagaaaagaaaagaaaacctagcgaggtagataattttccctagatcctgcggccgccggaccacgaggccggcgctgtgcgttgttaaaaggagaatagcagatggtggcgcgcagccccgcgaggagacatccagcaacgaaatcgggagatggaagggacagtgagaaggggggcctggctgtgcgcccccgcccgatgccccactcctcgccgacgggcgccgggcacctgcgggaagggcgggagaatcgccgctcctttcccgccgcgccctttccgccctctccccgcctccttttcgggcgtcccgaggccgctccccaaccgacaaccaagaccccgcaggccacgcagccctggagccgaggccccccgacggcggaggcgcccgcgggtcccctacagccaaggtaaggcaggaatctcctggactgggtcgcggtcccccggcttcccggaagcgcagtgcgcgggtggcatcactgtgcccggagcccctgcgcgccccggccatccccaccccgagggaccccctacggaggcgacctgggggctgaggtgagcgcttgggcagcagcgacggggaggggtgtccaccccacccctggtgcgggccggggcgcgcaggcctggaactcggggttcagactccccgcgactcggaccacgcggctaagcgcgctcagggtcgcgtgcccccgccccgccgccatgctgggcgccgtggtggccgcgcagctgggcgacagcaggcgtgggcgggggtggggagcggcccctcagcggtccctaccgcctgaggccagggcccggggacttttattgtgacacggcgggcgcccggctctgcttagtcatggtgacctgcgcgcgctccgcgcctcccccacgcgcagcgatggaggcgccggggctcgggcggtggaggcggagccggagcgcggccatggcggggtgagtgaggcgggatgtgcccgggctgcgggcatcgcgggccgcgagcgcccctgcggccgtgcccggagaccaggaaaacgggcgccacggcccagggcgcctccgagttccccgccaggactcggagggccaggagggcgcgacctgggtggatatttttgttggacggcgcaactcttggggtggcccgggagcggcggaaaccgagcgagagaaccaggaggcgctgcgcagaaggaggcccgggggctccgaggcgttgaggggctcgatctgcgttctggggttggcagccgagaggccgcggtggggtcacttcctcgcctcactgggcctggtggaggctcaggaggggcatgcgcagtcgcccacttgccgctttgtagggtgggggaagtgcccggtgcccaaggggcattgttgaccgattggccaaagaccaagaggcaaacccagggccttggcaccagagtgggggccgagtggcacccagggagggtggaggaggccgctctggcaggcacggtggcagggcagttagccaaccacccgtttattgacccctgcgcagtgccaggccccaggcgagaggcacaggagagggttggcccgacgccgacctacataggtctccctgccatttgaggcgctggggccggggacgagagacagtcgatcaacagacaagcaaaggaggtcatttcagttcctgacaagcgcagtgatgacaataaaacagggaagaggagactttgagttgagtcccagaaagaggggagtgagaacttgcagatccac

SEQ ID NO: 12757 - DNA, 2732 bp, Homo sapiens
tttgatgtgcttcatcctttgtgggcttgaagagtctcttgttcccaaaattattccctggggccctctgcttcacaggcaaataaaagcaaaaagaagcttgctcagccttaagtgaggaaatgactcacaggtttaaaacaaaaaaggaaaagatggaggcattttgtaggtgaaagggcgagagtcttctgatgcaaagtaagaggtcattagagcagggatggattatcaataagcagagcaaacatttgcttagggaacaaacagcgccggaacacgaaaaagaaaagaaaaacataataatttaattacttaaaacactgaagatggcaacataggaaaaaacccaaaccagaacatttttggacttcataacattttatggttcagtatttatggcttagtattttattttgaattacatgtggggaggaggggtaaaaatactttaatttttcttgctaagtaagtactattatatattcaggtataatgggataagggataccattttaatgggtccgtttggagctttaaatatgatcaacagtatctgtgtgcatgcaagattggttaagaaactgggttagaccgagtgcggtggctcacgcctgtaatcccagcactttgggaggccaaggcgggcggatcacgaggtcaagcgatcgagaccatcctggccaacatggtgaaaccccgtctctactaaaaatacaaaaattagctgggcgtggtggcccgcgcttgtagtcccagctactcgggaggctgaggcaagagaatcacttgaacccgggaggctggggttgcagtgagccaagatcgcgccactgcactccagcctggcgacagagcgagactccgtctcaaaaaacaacaacaacaacaacaacaacagaaaatgaaaacaaattggggtaaaagtctctgagagcttcctacagttacaactccaaagcttcacaaagccagtccctcctggctggagccagggactccaacgctgtgggcctctcagggggcggacccgcggcgccagcgcctgctcccttcccacctcccaaccctcctctctgctgtatcctccctgcgagctgtgtcgggggccggggggggggagtgggggccgaggccggacagcttcatctggaaatcccccgccactcacgggggaagaagtcccacgagccctatctggcctcgggcgctggcgcaacttgtctgctcaaataatctcgttccaaatctgtgcgttttacacaagaaacaaacaaacaaaacaacaacaacaaaaaaacacaactgggactcagatgacgttttaagttgtctttgaaaaacaatgcataaccctgcacgtataaagttgcctatgtcacataaccctaggcagctgtcattctggagtgatctggagttaagttttttgttttctttttcttttttcttttctttttttttttttagacagggtctcagtcactcaggctggggtgcagtggtacagtggcgcgatctcgactcattgcagcctcgaccacctgggctcaaaagattctttcacctcagccacccacccgcctgcccccaaccccgctaaacagccgggactagctgggactacaggcgcgcgccaccacgctgggctgctttctttgtattttgagagagacggggtttcgccatgttggccaggctggtgattcgctcgcctcggcctcccaaagtgctaggattacaggcgtgagccaccgcgcccagccgccacaaaacttttaaaagttattacttcgctaaaaataacagcgtagaagccattgtgcagcgccacgcgatctcggctcactgcagcctcgacctcccaggctcaagcgatcctcccatcttagcctcgcaggtagctggggccacaggcgcacgacaccacgctgggctattttttaaaataaaataaaaatcttcgccaggctggtctcgaactcctaggctcgacagatcctctcgcctcagcatcccaaagtgttgtgattacaggcgtgagccaccgcttccatttttagagttctattctgaggactaacgccgttcaacaagttggtgtgaatttgtttgcatttttcaaaaccccaaagccggcctgggcgccatccccatttgccccgggcctctcaggaccccgaccacaggcaggaccccgaccacaggcagcgccccgactccaggcagcgccccgactccaggcagggctacctccaactcccagcctccccaggccgggcccccgcccggctcccgacaggctcctctccccgtggcggggcccctcgcccaggcagcacaccctctcaacccgaccgggcccccaccactctaggagggccggcgttgggggagggcgccgggacgtgcccgagggtgacactcgggcttgggacagggcgtgctgccgcgggtcacgtgctgcggaggcttggggaggggcggcgaggcggggtttatagcccgggcgcccgcgggccccacgctttgaccgggtcgtggcagccggagtcgtcttcgggacgcgcctgctcttcgcctttcgctgcagtccgtcggtgagtgcgcgcccagtgggtgccccagcgaaccggtcccgggcccccagcggcgcccagttggggtggggggctccccggggccttgggaccgctgctctgctccccgcggggctcaaaggtggacgggac

SEQ ID NO: 12758 - DNA, 2730 bp, Homo sapiens
gggaaaaatttggctcaaaaatcttaaaatacactgactgtccttcagggactgggaccttccgatattctcttgtactcctggcttggccaagtttgacctcatttaatttgttcccaggagatgcctttgcacttaaccacatctgacccaactggagaggaatgcagcatgctgaaatagctggtttatctctccactctcccctcctcatttatggaagaagaaaaaaaaactaattttactgaaggaaaggatgacaatgaaaaaaggggagagggagggcggactcttttcagtcctgtcaccacctagaacttctggcatccaccaagattacattaatcagcgaagtaatccgaatgtgacctagagggcttaaaagtatgaagcctaaagaacaaccacacagaactggtttcgccctgcccagtggaaatctccgggtgattgcaggcactggtgcacgttattgaatagcgcccactccaatggcaaagtgcgaaaagactgacttcaccacagccaggagtgcaacgacctgcagctcctcggtgggcgccaagacacgctctcctgaaaggctggaatcgcttatcagttctccgcgggcaaaagcaatcagagcatcaatgtaaatgaatcgcaccccctccccgcacggagataaagttttagcatatcccagatggtgcagagattactcattcatttctgagaaagagcagaaccacagaggccttggctgaacctgaggaaactgatcagggtgccccgaaggcccgctagtgaatggcgggtcgcgctcccaatgggagaagagaatggtttcctgccgccgtgctccgcgccggcaggccggggctgagcacaagaagttaaaggctcactggccgcccgcgcactcaaggcaaattccgtttctgaaaaggcaggttcaaaagacaaaggttggtaaaccacaccggtatcatttacgacgcggcacagagacgctttcctgcagaatgtcatgtcactggcaaatgccatggaaccgctcctgactgtggaccgctctggcaatggggcgtgctcatcaccagccaaaactgatgcggaaagtcagcgtggctaactgggcgctttaaagtctgacttcaaagctgctccccaaagcttggcactatgacacagagcacctcatgttatgactaaacgagttaatccatgtcaagtgctgagagcagcacctggcacccggcaagacctcagtaaagattaaccatcattactattaatatttgctcacgcttttccactatgaaattattgtattgtgtctgcattacatatgtctcatcttatatgttataaacacctagaaagaggaggctgtgacttatttatctcagtcatctcggagcatggaactgtgctggactcagtaaaagtttgtagtttgattgaattaccttctcaaaccaaacatttcaggtgtgtcaccttgcagaggtgacagaaatgaaaacagggtggcaaaataaaaaggtgaaatctgaatctcctctaatccttcattttctcaccctgtttcttcataacacccctcattgtgttgctgcttgttacatttttgttccgctgggaactggttccatttgagcctcagtgcaatctgtggccccagttgccacacacacttaaagctcaataaatttgatatctcctgaacccccacagggtttggatatcataagggatacttaggcccaagatcaagccatatgagcaggtttatttgagaactctacgttaaagcctccagcaagtgcttcttgacatatatgaagcaataataataacaaccgctatttgctaagtacttattatatgttgagatatgccaaacactttcacatattatctcatttaatccactcaacaaaacaaaatgtgtgttatttctattttatcaggcaaaaataaaaaactaatcagagaaaagtcacagtgagccacttgcttaaggttatactccccagtaaaatgttgagattcaaacccaagtccctaacaatccaaagctcatccaggtaaccattcaagtcaacaatggtctccggccacacagctcagctctaaacagaaacaccacagcactaattatctgtggagcagagtgcagtgtgcctcccatgctccacagcacagcacggcagctcagcatatctcatcttctacaaaagactccaaagatttctcttttcaccagctcccaattactgccacataacacatgccttgaaatgtgattgcctctggtttgtaacttatgcctaagggacctgctcccattttctttcctagtggaacaaaggtattgaagccacaggttgctgaggcaaagcacttattgattagattcccatcaatattcagctgccgctgagaagattagacttggactctcaggtctgggtagcccaactcctccctctccttgctcctcctcctgcaatgcataactaggcctaggcagagctgcgaataaacaggcaggagctagtcaggtgcatgtgccacactcacacaagacctggaattgacaggactcccaactagtacaatgacagaagataaggtaaagcagcattatattcatttcaagtctggttttcaggagatagttaggggaatacagtcaagtcatacagaggatttgggggaggttgggtgtagctaccacag

SEQ ID NO: 12759 - DNA, 2727 bp, Homo sapiens
ttcaagcaattctcctggcttagcctcctgagtagctggcgcctgctgccagcccggctaatttttttgtattttttagtagagatggagtttcaccatgttggtcaggctggtcttgaactcctgacctcaggtcatctacccaccttggcctcccaaagtgctgggattccaggtgtgagccaccacacccggccctattttcattctgtttaaagatagggtcttggtctgtcgcccaggctggagtgcaatggtgcagtcagggcacactgcagcctcaacctcctgggctcaaggaatcctcccatcttagcctcccaagtagttgggactacagatgtgggcaactgtgcctggataattttgtagttttttttttgtttttttgttttttgtagagacagggttttgccatgttgcccaggctggtctcgaattcctaggctcaagctatccattggcctcggcctcctagagtgctaggattacaggattgagccaccatgcctggccggatatgtaaattttaatagattctgtgaaaatgaattgtaaaagtttgtaacaactcccatgtttactcagaaccatgtgtgaatgttccctattcctacaactttggcaatgtttagtgtatgctatgaattttttatacagttactagtttaatgggtgaaaaatagtatttgttttaattttcatgtcattaatagtgaagttaatattctcttattgccttttttttttttaagagatgggtctctggacaggcacggtggctcacgcctgtaatcccagcactctgggagaccgaggtgggcggatcacctgaggccaggagtttgagaccagctgggccaacatggagaaaccccatctctactaaaaatacaaaaaaattagctgggcttggtggcacgtgcctgtaatcccagttaccaggtggctgaggcaggagaatcacttgaacccgggaggcgggggttgcagtgagcccatattgtgccattgcactccagcctgggcaacaagagcgaaactctgtctcaaaaaataaataaataaataaataaataaatagatgggtctccacgctttgttgccttaggctggtttccaactcgtgagctcaagtgatcctcccacttcagccttccaaataggtgggactattttattgctctttgaccattttaattgtttttgtaaactgtctgttcatatcctttgcccattaaaaaaaggtagatcatttgtatatttcttattgatggtagaaatcctgtctgtgttatggataataactattctttgtcgtctgcatttaaaatattttctctttttcacttatctttcagcttttgagacaaaagtcatgctttatgggaaaatatttgaaacatttctgtctttgctaggaacaagccagggatgtttactattaaaactaagattttaggagagctcctggccaccctaaagcctccttgatttcatatatattcatcttacaaagagaaacgattgacaatgtatcaaaactatggagttcagcaacatgaccagatgtcagattaacaaacaaaaattatataaataaaatataagaatataaccaacactaaaataccatagaataaataatctgattcacaataaaaacattatattttggccaggcgaggtggctcacacctgtaatcccagtgctttgggaggctgaggtgggaggattgcttgaagccaagagtttaagaccagcctgggcaacatagtgagaccctgtttacaaaaaattaaaaaattaacccggcatgctggcatgtgcctgtagtcctagctactcaggaggctgaggtgggagaattgtttgagcccaagagttcgaagctgcagtaagacatgattgtgctactgcacttcagcctgggtgatacagcaaaacttattctctaaaataataaataaatattttttttttttttgagatggagtctcgctctgtcacccaggctggagtgcagtggcatgatctcggctcactgcaagctccgcctcccgggttctcgccgttctcctgcctcagcctcctgagtagctgggactgcaggtgcccaccaccatgccgggctaattttttgtatttttagtagagatggggtttcaccatattagccaggatggtctcgatctcctgacctcgtgatccacccgccctggcctcccaaagtgctgggattacaggcgtgagccactgctcccagccccttctggtattcttgtttttttttttgagatggaattttgctcttgctgcccaggctggaatgcaatggtgcgatcttggctcactgcaacctctgcctcccgggttcaagcgattcttctgcctcagcctcccaagtagctgggattacaggcatgcaccaccacacccggctaatttttgtatttttagtagagacggggtttcaccatgttggtcaggctggtctcgaactcctgacctcaggtgacctcaggtgatccacctgcctcggcctcccaagtgctgggattacaggcttgagccactgtgcccgcccctcacccccccttcttgtattcttatggttgtatattttcagtttctgtctttatcttagctgcagttaatttttgtcaatgatgagaaatagtgagaaatgccacacggacctgtgatgcagtggaagaggtagccta

SEQ ID NO: 12760 - DNA, 2711 bp, Homo sapiens
ctgactcatcagaaaggcctgccgcgcggcccggggggcgggggaacgtgggggaccgcggggagctgccgggcaggcggcagccgaggtcgtttgaggcgcgcagagccggaaaaccccacggagacggctgggcgggggcggggcgatcggcactgaccaggtcacctgcagcgcgggctgacggcgggcgactgaaggagggagcaagtctcccacccccagcagccggcggccgcttccgaagtctgcccccttccactgcggagcggcgccccgcgggcccccagccagcgcgcccgaggcgcccccgccccgtgtcgctcgcgctgcgttattgggagaaggcggttcctgagcaccagcacgggcctcggtgacaccggaggtcgctggggtcttccccttccccttaagactctgggtctgtctgtgggaagagctttcattccccaccccactctatgccgaccctctccgggggaggctccactggcactgtagacaccacgtgctgggtaaaaaggcctggtcccagcgcttccctgtcactgactgctaaccacaaggcgccgtggcactcaggaaatgcggcaggggggctggagaactatcaggaaggggtgtgggcagagaagaggcttccaccctgtcttggaacacggacacagtccatggcattcaaaagaggtgggaggctcctctgtgcacgtgccttccgcccccgggacaggtggaggaggggatttgactggtcctcaccctctgcatttatagtctgggcacaccttgggcagtgccgcaggagggcgctgtggagtacaggcacatgcagaaggtgtggcgagggcttcctggtggagctggcagtagggcagggaccttgaaaaggaatgatttgaacagatcggaaaagacattccagacagaaacaaatgcctgaaacccaaaccgagaagcaggaaagagcagactgcgttctcggaatggcagggagtccagtttgactggaagacctgaggctcagaggcgcatcacggcccagatgcagaccacagaggcaggcacagtggcccaggaggaccgaggacctggagtcacggggttccgcccgctgcccctggggaaccgagtcatgccagttcccagacagatgaattccttccaagaattccacagtcctgctcaatcctagccgccaagcctcctggccttggatggctgctgtctaatgcagatcctctttcatccagatttcaaatatttttcctattctgtcctttgatcactaacgtttatgtttatctacatcagcatccctcaatcctgacggcactctgaaattatctaggggtgctttaaaaaagaaaaatgttgatgcatggccctcctccaggaaatctgattttattggtctggggtggggcccaggcatcagcagacttttaatgagcagttagagaggagaaccactgatggagatggtcaccagggagtgtccaggtcagaccgccacagaagagtgcagcctcctggccttcagacccaactgggacaaaccctgagaacagccttggcagacctccaggggcagctggactccctgaggctggatgttgcagcctctcccaggcatccactctgcagctgaggccaaagtttccaacgggaagggagggtgaggcttctatttgtttcccaagagccagctgacctttgaagctagtgataaccaccacaaacctcactggtgggagaacgaggcactgcagccagttctcatcaaccccacatccctgcagggggccccaaggcggatgtgtcaccatcctctgcaacgctgggcctcagaggtggaggaggcccagccatggccagatgggggatctggggaacaggtcctctgctttctgggaaaatagaggtgatgattcctggccccaaaggttcttgttgggagtcttgagataaatcccctagcagtgctcagcatggggagaattttcagtgactgttcccttcctcctgttttgctaataactcttttcacaaatttaggagagtctccgagtctgggccttgccactcctcactcagcatctgaccatccccacctcctggatctacagggttcatagaggaggacccagaagagggaaagtcaggctgaggaacttggcctccctgctgcaagggaaatgacatcggttaccaaggaggtgaccagctatccttttccaagactgaaaagcagaaatacggccctgaggctagagggtctaagagaacaataggaagaatttcctgacaaaggacaatgttgcctaaaggactcaggaagctctgtgaaaacaggagactcccgagcagagcaccagacccttctccaccaggcagtgtttttcccatatgacaggtgagaaaactgaggctgagagacatgtaataacttgctgaagcagcaaccagcacaccatatagctgaaatctgtagatcagcagttaaaagtggtagggcaagtcctctctgactttcagcgctaagagcctaggattctgtgtttttctgcttaagcctgggaatcagagtcctacaaaagccgcgcctaatcctgggggtgtgggctttaaacccagagagaaagcatgttattggaatactcctgcacttttctccctttgaatcccaccacggaaagaaaattctgtga

SEQ ID NO: 12761 - DNA, 2694 bp, Homo sapiens
tcacattggaaagggaagtgttttttctcagtcttttcggtattaacaaataccttttatattactatctatcccctctgccctctatggactcttattttgaaagcaatatccagtggacagccaggatttgttacataacaattaatcttgaccttaggacttgttgttctattaggttggtaactttgtctgatccaccaatcatattgctgtcttgtcagtccatcagtttcaagaaacaactgtacatgtcagtgccctgatttgtgtttgtttttcttttttttttttttttgtttcgttttggttttttagagacgtggtcttggtatgttgcccaggctggagtgcagtggctattcagaggtgtaatcatagcacatttgtagccttgaattcccaggctcaagtgatctttctgccgaagcctcctgagcagatgggaggcgtgcatcactgagcgcagcaattttactaagttggtctagtcctagctcagtagttctttacttagcacagagggggcttcttagaatctcctaaacttgatcttagccaaatggccaagaagcaatccttagaatcttctaggagagcctttctaaatgctgatactgcaaaccgaaaagtatatgaaacggatctcaattaatttagaagttaattttgccaagtttaaggacgtgcatcatctttggagacaggtccgtgcctttctccaaagatgattttgagggcttcagtttttataggggaaggggcagatattggggaaagatgaataaattttaaaaagatgtgggtagataagaggcaaacggttgcattcttctgagtctttgatcaaccttcacatgtgaggggggtagagaaatagtcacttatgcattcatctagctcaatgaatctgcatttttacataagataaaataaaccggggagccgggcgcggtggctcacgcctgtaatcccagcactttgggaggccaaggtgggtagatcacctaaggtcaggagttccagaccagcctggccaacatggcgaaaccccatctctactaaaaatacaaaaattagcggggcgtggtggcgcgcgcctgtaatcccagatactcgggaggctgaggcaggaggattgcttgaacctgggaggcggaggctgcagtgagccgagttcgcggcattgcactccagcctgggcgacagagcgagactccggtctccaataaacatggaaggctgtttctccccggtttgctggaataaagtctctgtcttccaaattccttttcggagaacttttgttcacaagattaaaaaggtcacgcagctggtgacggagcctgggttttttgatttagacattgtatccatgtgtgagatcctgcccatccccgctttcttggtgtcctgtgagtttaaattcatgaattcactctcaactgccaccgctaacaggacacaggccaattccaacacgaaccccaacggctctcctcagggtcacctttcatgagtccgctttccggccaacccctcctctcagtcttaggccccactgcaagcctactcccgctcaccgtacagaacctaagcacaggatcagagatggggacaggttgactcagtcccatgcccaagtccgcaaattagggattcggctgcctaagggctagagaacgctccccgccccacaggacgcgccccaccccgccccctcctcctgcccctacgcacgcgcactctcacgcgcctgtgttgccgcccgcggccctggcttcgggcttcagggagctctggtgcagtctccgcctgtcagtgccggcagtcgtccgcggcgcccgccccggtcccgcactggtgcagccatgtcctcttccccgtgggagcctgcgaccctgcgccgggtgttcgtggtgggggttggcatgaccaaggtaaaccgagcagcggccctgctggccctctgaggctcgggggcggtcggtgcctgggtttctctgtccctccggtctcctagcttcgactgctccgcgcgtgggtcatcggcgtggcgacttggtggcttgtactctgcggaatctctggggtcatagcgtctcgggctggttcctgcggccttctgcttcctccttcccttttcttctggtcagagttcatgaagcagccccgagataatccaaggatctcacctctttagattctgagcggagtcccgaggtgtgtgggctggcttgccccggagggaggcaggtcgcgaatgccgcctgctcggccctcccaggaacagcccccacaggagccctcacagagacagctccagatgtggatggcgaggagaaacgctcctgatgcccagcgcctcggcccgagtggcagattccggcctccctctgtccctccagtgactgcttgggacccggacgccgcaggctcccacggccgttttcccctcatcgcccgcatgctccttaatgccaaactgcctttcgtttctccccggacgcagttgtctgatgcctctgttgctttgcttctgttctgtttgtaccgtgtatcttcacctgttaacttttgtgcatcctgaaaggatccgttcagatcggatcttctccaggacgcctcggatcctcctgactttcccctagagccttgcactgtgcttacctctgtcctgcacttactgtgctc

SEQ ID NO: 12762 - DNA, 2684 bp, Homo sapiens
tgagggtctttaaaggagaagggagaggggagagagtgatgtttctagattttatggcttgctgtggaggagaggggctctactttctatgacctgcctggggaagagggattctggtttctatgattcacttagcgggagaagaaggggcaggagacaggaggatgggagaaggtcagagagaccttgtttctgaggccttttcagtttccttcagttcaaagtactcagcatgccaaggtgccatactttggggtatcatgttctaagccccccaaaaaagtgcctgacacacaacgggtgctcagtaaataatgtaagtccctttcttctgctgccaccccaaaagagggaccctctctcccagcttcctagtgaggatggaatgatgtattgaaccagcatgagtcccatctacttacccgttactaaggggaattgtgataagctcttcatgtgtaccccactgtgctgttctcctattctcagttcatctctttgcatctcaacttggaaggtaagaacttaatcaggatgcactgaacaattggcagaaactcatgtgaatgtaactatcttgtccagttccttaacctgtgctaagtccaggcaggcacctgaagaaaaaaaaaaaaaagcatgaaggaggcttttgcccaaatggcactatacttgggggattctgagtagggctgaaacagcctttgcaaaaattataactgaggaaattatggcagtgacaaagatcagacctaaatgactcagtctttcttctaactttcatgctgtccttattcattcctgggcataggccaaactaaccttagaaaggaattcagtttatggtttgactcagaaacaaaatcaataatagccctttcccgaaaagacccccttcttgcctgggtgccagtctgcctttgtacgattaatctattagttacaacattagaaattatggtttaggggtcctgcggcgtcaggctgcaagagtctgaaccttcccaagttgctgctggggataacatcgctattgtaaaatctaacatcctattttgcagaccctgcactggatggatcagctgacaccactcagaccgtgtgtgatctggctcaaccagttctgcgatcccacccaggaacagaagactgcaagaaaacgttacttcaacccccctgtgatcccatctgcaacctgaccaatcagcactccccaagtcccaagcccctatctgccaaattatctttaaaaactcccagaggcagggtgcagtggttcaacgcctgtaatcccagcactttaggtggatcacgagatcaagagatcaagaccagcctggccaacatggtgaaaccccgtctctactaaaaatacaaaaattagctgggtgtggcggcgcgtgcctgtaatcccagctacccaggaggctgaggcaggagaatcgcttgaacccgtgaggcagaggttgcagtgagccaagaccatgccactgcatttcagcctgggcgacagagggagactccgtctgaacaaacaaacaaacaaacaactcccggaatgcttggggagactgatttgagtactggaatcccagtactttaggaggccaaggtaggtggatcatttgaggtcaggagttccagaccagcctggccaacatggtgaaaccccgtctctactaaaattagaaaaattagccgggtgtggtggtgggcgcctgtaatcccagcactttgggaagccaaggcaggtgaattatctgaggtcgggagtttaaggccagccttaaactggcgaaaccccgcctctactaaaaatacaaaaattatctgggcatggtggcatgtgcctgtaatcccagctactcgggaggctgaggcaggagaatcgcttgaacccgggaggcggaggttgcagtgagccgagatcacgctattgcactccggcctgggcaacagagcgagactccgtctcaaacaaacaaacaaaggaacgaaaacctccggtctccggcacggcaagctctgcgtgaattactttctccattgcaactcccctgtcttgataaatgggctctgtctaagcagcgggcaaggtgaactcgttgggctgttacaggaccagtgacagaccaagggcatgccactgaaggaatccctagacgcacccttctggatgtgagacaggcggatctcacccacgcctgccagcagctcctcggagaactgtgttcctgggtcagccctggcccagaggagcgccggggacccgcagagtgctgctgaagtcaaggctacaactcacctaggatctggggcgccagccctccggtgggcagggcgttctcctcccccaccccctccccgcacgatgacatcaagtgtttggcgttgagttgctccataaaagctgcccggggaagccaggagagcgaagggcggacgtactcgccacggcacccaggctgcgcgcacgcggtcccggtgtgcagctggagagcgagcggccaccgggagcccccggcacagcccgcgcccgccccgcaggagcccgcgaagatgccccggcgcagcctgcacgcggcggccgtgctcctgctggtgatcttaaaggaacagccttccagcccggccccagtgaacggtaaagtttccgcctgcttctttcctaacactcctgagcg

SEQ ID NO: 12763 - DNA, 2680 bp, Homo sapiens
taatagaaggggaaaaggcaagggtacagcccaacacagcgctgatttagaaggtggaaaggacagtaaagaccgcctggtggtgggagtggcaattcacaagcccagcagtagaatcatggaaagtggagttcgaacataatccagggctatagaccactcctgcatctgactgctattaccttgtcacaaatcctggcaggcaagatgacaaagcagttacatcaggacagttggcagtggcaggtatgaacgtggcccctcaggcttgtcactcctctttactgcactcccagttcatgacaccagacagcaagacatgagccagataggggcagtggaagctgcaggaggattgaagtcatggagccagagatgagaggaaacaggccaactctgtttacaaaggagcaccagcaggagagtggtgtgaggattaacattccatgcagggtctttcagatacatgatcttcttctgccagctcaactgaaacccaggaggtttcctgaaggtgaaaccaagacccttctacctctgaagccgcattctgtctaaggtccgtgtttggctgttttgagaggctgggagacaggacaccaaaagagtacctgtctcacaggatctttcctgagaggaatggtctagtaagactggtcattatgggctttggagtaacacaggcttaatgccactggcgactctgccccttttggttgtggaaactgggcaaatgcctcaagcttcttaaccttcatataaaaagcatatataagcatatagcaagtacttgataaatgtcattttagaccctgtcatttctgctagccctggactccagcaaggtccatttacaatggatagctgactatccattgtttgaatgttgatagcacatttgtgaacaagaagagaggacaaataacaagaggtttggaactggaagaaattccagccatcggttttaaaagacgaggaccagtcttcagagaggccactagtgacactctgctccaaacttctttttgccaaaaaagtgccaccctccatccagcccccacccccatctctgcaagtccttactggcgagaggaggatacttttctaattaaaaacctgtgatatatggcctgacaagtattcttaaatgtaattaaggggaccatagtacagaatatttccatccggttctagtttagccaatctagtaaatgatccaaagggtcccgtgcttagagggcagtaagacagtaaaaacgccctaagactcctccctgcacagcacctgcacccccactgcccagggggctgcatccatctccacatgactcaccctccctgtgcaacgcatgggggtagggagggaagcgccagtattatcagccatcagcaccctggggtgaactgattatcaggacaactaaaaacacacctaataaagccttggagacacatggcaagcaccgtgatggactagaagcgatttctaagctgaaatgctgctttgaatgcaatgtcagctggatgcttggtgagcagaaatagacaaggggaaatggagcaagcgcggcataggggtgagtgttgttctgattcctaagtttacctaagactggggccacggggtcgggtgtcccctgggacctacgtctcatgcagcctggggtccagagctggcaggaacaatggagatggggaccaaaggctgtcaccgctgctttttctcgaaatgcccgcccgggtcctgtctggggctcccgcctacgcgctcatcacgtgcacagcccaaacttttcagagccggcccgaggcctgcgggcccgggcgccagggtggtttttagggttttctttctttcttatttcccttcttcttctccacagttgatgattttctgcagaaaaacaactgcgaaaaagaacctatttcatttccagttcccatcaccgcgatttccacatggatgtgacgtgaccccagcttccgaaatgcccaggtgactcacgcggggacaccccggggcggggcgagggagtttctccgggcgcctgcagggaccgggcggggcggggcagcggggcggggcagggaaagggggcggggcggggcccgcaggcccggtcgggcggaggccgcgcgcgcccctcgccccctgcgccctctggcggccggctggacgcacttcgcagcccgacccagagagtcacgtgactttggaaagtcccgtggaaatccccgggcctacaacccgcatacaactgaaacggggcaaagcagactgcgcagtctgcagtcttcgtggcgggccaagcgagcttggagcccgcgggggcggagcggtgagagcggccgccaagagagatcacacccccagccgaccctgccagcgagcgagcccgaccccaggcgtccatggagcgtcgcctccgcccggtccctgccccgacccccgcctgcggcgcgctcctgccttgaccaggacttgggactttgcgaaaggatcgcggggcccggagaggtaaccgccgcgcctcccggagaggtaaccgccgcgcctcccggagaggtaaccgccgcgcctccccgtgccgtctgcctcgggctcaccgcagtcaagggctgcgggtgcatgttgggcagcgacccccgggctggcaccgtctacctggcgttggttttg

SEQ ID NO: 12764 - DNA, 2679 bp, Homo sapiens
agaggagattactgggaagggtgacgtggtgaggcgggcttgccagtgcagggtgaccctgagggtgtgcccagtggcgtgggtgtgtctgtgattgtggccaggcggggcaccctcggaggggagggttcggaagtggaatgcgaccccccagcctctttcccctaggggctgtaatctgatccctggggactccccccctagcctcccgccctcgccctcactgctgactcctcttccagatcctggggcagagtccagggcagctcaaggctcctccacacacacacccgctgaaccctgagcaccctgagctgctgagatggggcgggccggggctgccgccgtgatcccgggcctggccctgctctgggcagtggggctggggagtgccgcccccagcccccacgccttcggctctccttccaaggtaggtgcacctggcaggcgggagggcccagcttgaggtgggcaggaaagggtccccgtatggccagggggctctgtgttggctgttgccccatgtgcgtgcctgtcaccagactctggtaggattagtgggcactctcaggccacctccagttaaccctgtccgggcctcagcccccagcctctgcccacattctcttcgtgctttctcaggaagacccctcctgtccccacagcaacagaccttgtctctgttccgttcagtacccccaacaaggcgatactccttcagcagagcaacagggaagtcagagcccccttctcatgcctcctgtataggagggtggcccctgggcagtggcagtgaataggcagttctgctgagctcaggctggtggtggagtggcaggaaaggaactctcagcctgacttttgggagttggggttctggccatccctgcatgccagtctcccccaggactctggtgtccataagccttgcctcccagtgcgcccgcctggagacaccacctgtctgagcatgcccaagttcaacctgccttcctcttcctggggggatgtaccacctaccctggcagctccacacgtgcacctgggtgggcttgggtttgcgtgtgtaaactcacacacatgtaaactcacatgtgtacaggccaggtcctaatggcaaccttggccgatagagtcaccaccaggcaggacctgggggaggcttccagcatggctggcgagtcatcagcagtgtcctgccctgcagagctccaggcctggcatggtctccagactttcagcctggagcgaacctgctgctaccaggccttgctggtggatgaggagcgtggacgcctgtttgtgggtgccgagaaccatgtggcctccctcaacctggacaacatcagcaagcgggccaagaaggtgccagggactcccaaccccagcactccccagggaaggagccctgggaccccactccagcctggagagacccagaggaatggctccctgaggtagagaatatcccaagttcctgacctgtgtcccctctcccccaacctcccgatagctggcctggccggcccctgtggaatggcgagaggagtgcaactgggcagggaaggacattggtgtgagtgccagctgcccgggccgggagtggggagggtcagcccctcaccccagagacagggcagggctaaaacagaggcctgcctgttctggctgggatgagggcagggaggtcgaggtggctgaggtctgggggtggtgagtcagggtgggggctcgtgtaattcttctggggtgcctctgagtcatgggaggctttgcaggcctgtgcttccccagacacccaccctcgtgaggcctgggctggtcagcaagggcccccaggtccctgtagcccatgttagtacttgcctgggctgatgccgaagagagggaggggtgaggatgccactggtgagctgggacctcttaaggctacgtccctgggggaagcctcacacctccaaccctactagactgagtgcatgaacttcgtgaagttgctgcatgcctacaaccgcacccatttgctggcctgtggcacgggagccttccacccaacctgtgcctttgtggaagtgggccaccgggcagaggtaaggccggatctaggcagggagggaggtcaggagggtaagaagggcctggtagtcacaacttgccacacctcccaggagcccgtcctccggctggacccaggaaggatagaggatggcaaggggaagagtccttatgaccccaggcatcgggctgcctccgtgctggtgggtgagtccaagggctaaggccccaagagaaccccttagaaactctagaacctcacaaagtcccaagacccccaagagctccagggaatcccccataacctcactcactcccagagctccccaggccctcctgccccaagagccctccatttgcctgagtggcccttgctctgtctgcaggggaggagctatactcaggggtggcagcagacctcatgggacgagactttaccatctttcgcagcctagggcaacgtccaagtctccgaacagagccacacgactcccgctggctcaatggtgagaggctggtggggttggtgggtagaggtcgtcaccctcccacagggcaggtgccaagcaaggcccataaagtaagtgagcagtgggtgtggccaggtcttaccaaataccctcc

SEQ ID NO: 12765 - DNA, 2674 bp, Homo sapiens
aaaagtgtgcataaggccagaaacagtggctcgcacccgtaatcccagcactttgggaggctgaggcaggaggaccacttgagcccagaaatttgagaccagcctggacaacacagagagaccctgactctacaaaaaatttaaaatttagccatgtgtggtggcacatgcctgtcgtcccagctactcgggaggctaaggcaggaggatcacttgatcccatgaggttgaggctgcagtgagccgagattgcatcactgcactccagcctgggatacagaaggaggcccgtctcaaaaaaaaaaaaaaaaaaaaaaagttttaggagacatcaggtattgggacacccagtcagatgacagaaaaaaacaaacaaacaaacagcaaaactgtccctttttaatcctgccctgcaactacagatggtacagttccgcctagaggcagggctccacctccagcctcctctggccccctcaccccatgctgtcactagggcaggggctgcaagagccagctgggaatgtcactggagacaaaaccccacacctgtggtcgagctcttcccagcctagcagccatgagtttcacactaaatcctggcccaccccacagaagggccctgggtgcacacagtcctcccagccaagcgatttggtgacgctgtgacgtgtttcaggaagttcaattttaactctgttcccacccttcgctccaggacttataattctataaattaatcctgagttaattatcccaaatgcaaagatttacatgcaaagatgtttccccaaagctttcacttggtacatccacagatacacacacccacatataaacaaggagtaggtgcaggcaacctgatgcccagcagaggctgattccaacactggacaggatgacctcaggggcatacacagtgcagcccgggatgcaaactccagaccgtgcatctcagggtgggatccatgcctgactttgcttccctctacttttctgtattttctaagtcacctaaggtaagtattacttttacaatttggaaagaaacaacagaaacctcatcctttaaaaacaaaagcaggctgggcgtggtggctcactcctgtaatcccaacactctgggagccagagaagcaggaggattgcctgaggccaagagtttgagaccagcctgggcaacatcgcaagaccccatctctaacaaaaaatttaaaatatgagccgggcgtggtggcacgcgcctgtcgtcacagctactcagaaagctgaggtgggaggatggcttgagcccaggagttcaagaatgcatcgaactgggattgcgccactgcactccagcctgggcgatagagcaagacctcatttctaaaaaaattttccttttaaataaaaaatagagcaaaacaaaaagcaaaaccaaccatccaacacagctgctccaccccatgacaggaaagttggccccaggcgggggcaaaggggcagtccaggaagtacagggattcatgctgccttccaaggggaagtgagggagccgcctgcctcttccctggaggggctgggggaagccgatctgaggcctggccatgcgaagccccatctgcccttcatctaggcttctggaaggtagggcgtccttcctccacgtggaggacgggatttaggaaaaggggctgtctcctctcagctcgggctgtgcatcaggtactaggagcactcaaagagagcccccaaactcaggtttctccatttctctcccgtcccccggggcgggcacggagggactccgccgccgccggcagtatgcggggtccaggccgccccatgcctgctctaccaggaggggaggccaggatccgccgggcagacggctccgcggttcaggtttccacccttgttatttaaagcctgagcctggctcctggcaggcgggcaggggcggccgcctgcctgcgtgaccaggatgagaaatcgcagtcctgacgcgggcctgcgtgcctatggcaactggcgttgtggccttggagactaatctccgggctgtcagccggcggggactctccagcagggccacggctccctgcaaaggcccttggctgggggatcggacaaggctctcttccagtggaggagggggcgcttgcccctgcactggggcccctggccaggctcacagatccacatgttcccacggccacagcctccgtcacacacacacgtggggacaatcacaggggtggggacacagccaccagctcacaggcaccaatactctctcacactgtgtcccacaccgcacagggcccaacagcaggtgctcctgcccttgaaggattcccaggctggcagggaaaatgaccaaaaaaatagactactgggaaaaaaaaaaaagattaaaacacagtgcaaggatttgagctgagtgatggttacatgagtatacaagtcgggggaaaattcatcacacgggatgcttaagatttatgtacttgggctgggtgcgatggctcacgactgtaatcccagcacttagggaggccgaggcgggcagatcacttgaggtcaggagtttgagaccagcctggccaacatggcaaaaccccgtctctactaaaaatacaaaaattagctgggcatggtggacgcgcctataagccactcaggaggctga

SEQ ID NO: 12766 - DNA, 2659 bp, Homo sapiens
ttctttgattccacccactgtttacttgtgcatcaagtgaagggtctgtttgattcccatgttttagcatgaggccaccaaggtcatgcaggacaccatcaatgagttcggtggcacaccagaagagaaccgcatcaccattgccaacgtggacttggtcctgagcaagggcaatgtggacgtggcgctgaacatgctaaggaacatcttgcccaagcagtcctgctatatggaagccagagagaagatggccaacatctacctgcagaccctcagagacaggcgcctctacatcagatgctaccggtaagccccacaggcagcacaatgacagcttcttctccaatggtatcttagggagtgtttccttcagatggtatttcttcaacctgggtctccagaatgtgtccttggagtgtagttgatgaatgtatggaattgtccatgggttacaatttgagcatgaaaggtcagtaagccctgttcatggatgaggatacagaatcgaattggccctgagccctgcttgcctccccctcacctgcttgcacatgctagtgggagactgtaggcctggttctcagagcagacacactgaagctccaagctgctgtctctgtatgattttgcattgggacctccaaggtgccttcctcatccctttcttctggcagagctgcatctaagcaatttaaagtgggaggtggggatgctgagggagtagggaaggctatccagcagtgggaaaccagtgaacagtatggaggcacggccagattggagttttagaaagagtgacattgctgcctcatggagagggatctggagggatagcaggtagagtgagaggaacaggtagagggcctggccatggcctaactacagagatggatgtggagagcctgactcaggtagctagcacagtgcctcattcacagtggactttctataaatattgattgatgaatgaatgaatgtcagccagaatcagtgggaaggaagtgaaggagatgatttcaggaacatgaggtgtgtgcgaacctgggataagcttttggttactcttgcttgcagtgagctctgtgaacatctgcctggcccccacaccagcctgctactgggcgatgccttaatgagcattctggaggtaagtgagaggcctcacagccttgccaagtggccccccagtctcccttctccagtgggagagaagaggaagacccaaagacactttccccaccagcccgagaaggccctggaggtctatgatgaggcctatagacagaacccacatgacgcctccctggccagcagaattgggcacgcttatgtgaaggcccaccagtatactgaggtcaggctgggctagggtgtgaaggggcagggagggccagcccagcagggaaggaggaggacggtacatgactggggagctctgggtgggaggagagtggctgacttttcactcagctccttgctgaatggggtgccaaggggagaactcagcaactctctgctgctgaccacacctgcttaagctgagggttacaccctgtgccagctgggaggagtgccttttcactttaggctatgttctggaggggcacactggtgtgatggctgctgaggggaacatggtgtcgggcactgaagggcagaaccaggccagaggctaatatttactgtttgcactaaggcaattgagtattatgaggctgcccagaagattaatggacaggactttctgtgctgcgatctgggcaaactgctcctgaagttaaagaaggtcaataaagcagaaaaagttttgaagcaggcactggaacatgacattggtgaggcagcattgtaacccatttctagcatttggagcagacatactcctcccccattccccattagctgaagtcctgatcccagcgctccccaccaacacagcttcccaggagccagtgaactaacactaatttgagtttccatttaacagtccaagacatcccatccatgatgaatgatgttaagtgcctgcttttgctggcaaaggtttacaagagccataaaaaagaagctgtgatagaaactttgaacaaggtaattgacaggtggactcaagctctttatctgccatctgctgatgggggctgaaggaggaggaaggagagagctccaggtctggaaagccccagacctcttccttaaaaaaggacctaggttacacctctgacatccaccttcacttattttcccgtcctggttcattcagttatggtacactaatgtgctctgagctgtggtgggctgggaaaggcaggaagtaagagagtgcctttgtcctcaagggtgatagtagagataataaggatggtaatgacaatagctcccatgcattgaaagctctgtgctaggttctgtagggtttttgctttcttattgaatgatcacagtagccctttgtaataagcattgtgacattcccatgtagcagataagtctctaggaggttgagaaatgtgcccaaagttgggttcagttgtgttagtctgtattctgttggtgtataccagaatacttgaaactgggtaattcatacattttctacagttctagaggctgagaagttcaaggtggaggagccacatctggtgagatcctttctgct

SEQ ID NO: 12767 - DNA, 2645 bp, Homo sapiens
cactattgtcctatgaccctgccaaatccccctctgcgagaaacacccaagaatgatcaatttaaaaaaaaaaacaaaaaaaacacaaaaaaaacattatattatcgactataccttaaattataataaaatgttatatatgtaatggtaaaaaaaaaaaaaagagctgcaatctgatcagctgcttgtggcttccctctatagtgctattcctatttatcctttcctttctattttcattgctcccacgtattacgtttggttatcctcctctttaatcattgctatggaatatttgttaatatttctgaaatataactatgatgacatcatcctccacgcaaaatcatacagctcccttggccacaaaataggatgcaagattgggtgcgttggtgcaagcctgtagtttcccaactacttgggaggccaaggtgggattgcttgaactcagtttaaggccagtctgtgcaacgtggcaagatccctccctctccccactttattttttgagacagggtctcgctctgttacccaggctggagtccactggtgcaatcacagttcactgcagcctcaacctcctggactcaggagatcctcctgcttcagcctctgaaactgctaagatatggctcaggcctgtcatcccagcactttgggaggccgaggtgggcagatcacgaggtcaggagatcgaggccaccctggctaacatggtgaaaccccgtctctattaaaaatacaaaaaattggccgggtgtggtggcatgtgcccgtagtctcagctacttgggaggctgaagcaggagaattgcttcaacccgggaggtggaggttgcagtgagccgagatcacgacactgcactccagcctgggcaacagagcgagatgccgactcaaataaaaaaaaaaaaaaacgtttttatagacatggagtctcgctatgttgcccaggctgggctcaagtcatccttccgcatgggcctcccaagcgccagaagctgaagcaatgttcactgagttattcctgcctccacaatctttatttgatcttggtccaactcttctgtaccatgtactccacaccaccctcatctaacaaattccctgctcctattcatagtgggcctagggagggaaaaaggttaaacaggagaagacaaagatcagtgtgaggggaaagttgaggcgtgaaaactggagctcccctgtccctgacaactgtaacagggcccagttcgttttttttctttttctttgttttgagacagagttgtgctcttgttgcccaggctggagtgcaatggtgtgctctcggttcactgcaccctcccactcccgggttcaagcgattctcctgcctcagcctctggagtagctgggattacaggcatgcaccaccacgcccagctaatttttgtatatatatataatttttcttttgaaacacagtctcacactgtcgcctgggctggagtgcaatgggaggatctcggctcactgtaacctccgcctcccgggttcaagagattctcctgcctcagcctcctgagtagctgggatgacaggcatgcaccaccatgccaagctaattttttgtatttttagtagagacggggtttcactatattggccaggctggtctcgaactcctgaccttgtgatcctcccgccttggcctcccaaagtgctgggatgacaggcatgagccgccgcgcccggccagggcccggttcgttaccctgagtctaaaagtgtctgaaaaaggcccatgaccaggcttggccgagaaaactaggacgtgggctgggcgcggtggctcacccctggaatcccagcgctttgggaggccgagggggggcggatcatctgaggtcgggagttcgagaccagcctggccaacatggtgaaaccccatctctattaaaaatacaaaagctgggggtggtggcgggggcctgaaatcccagctactcgagaggctgaggcagcagaatcacttgaacccgggaaggcggacgttgtggtaacccgagatcgcaccactgcactccagcctggggaacaagagggaaactccgtctcaaaaagaaaaaagaaaaaagaaaaaagaaaagaaaaccagggcgcggtagtgacagcctcagatttcgggaaagaagacctgccatgacagaaaccgttacagcctccgtcgttcttttccgcaggtcgggcctcgggccccggtctgacccaggtctctcgctggcttttttcaggagcagtcccggccggccccgcctcagcccttctcgttccccgggggccgctccctttcggcagtcgcagttcccgcctctgggctccggcgcccgctgagccgacagaggagaggcgtctcgtgcgctcgttccagccgcttcgggcgccgagttccaggacccgccccccgcgccagttgccagggagcggttgccatagagctgagcagttgtccgcgtgcgcaggcggaagtcccggattgaggcgccgccatttttgctgcccggacgcggagcgagaggctgagagagtcggagacactatccgcttccatccgtcgcgcagaccctgccggagccgctgccgctatggatgatcgagaggatctggtgtaccag

SEQ ID NO: 12768 - DNA, 2645 bp, Homo sapiens
cagaagaccacaagtcacgaatgtggccacttctgattctgacttcaggggtcacccagaccccaagccaccccaacccgataaaggcaagttcaccttgggcaaagttcagagccagcagcacagctgaaaggcagtggacagcactttcagatgctgtattccaacatttcaactgacatgaagtgaggcaagaggggaaataactaacagtaatctgattaaaaaacaaaagagaaaaaaaaaagggcctggtgtggtggctcatgcctgtaatcccagcactttgggaggccgaggcgggtgaatcacctgaggtcaggagttcgagaccagcctggccaacatggcaaaaccccatctctactaaaaatacaaaaattagccgggcatggtggcacgtacctgtaatcccagctactaggggggctgaggcaggaggattgcttgaacctgggaggcggaggttgcagtgagccaagattgtaccactgcagtccagcctgggcaatggagcaagactctgtcattaaaaaaaaaaaaaaaaaaaggactggcctgggtttacaggtagctcacacctgtaatctgagcacttggggaggctgaggcaggaggactgcttgaacccaggagaccaacctgggcaatacagcaacacactgtctctacaaaacatttaaaaaattagctgggtgtggtggtacacatctgtagtcctagttactcaggaggctgaggcaggaggattgcttaagtccatgagtctgaggttgcagtgagctatgactgtgccactccattccagcctgggtgacagagtgagatcccatctctaaataaattaatagaccataaattctgtaatgtgaatctttagacaaagactgctaaatctatcatctgatatatgaagttttattacaacaaatgtttatatattgagttaaaaattatctgtacccatacacacaacctgcatttacttaatttaaaaggagtgtcaatattaaaattgaggattttggccaggtgcggtggctcacgcctataattccagcactttgggaggccgggtagatcatttgaggtcacaagtttgagaccagcctggccaacacggtgaaaccccgtcttgactaaaaatgcaaaaattagccgggcatggtggtgtgcccctgtaatcccagctactggggaggctgaggcgggagaattgcttgaacccgggagacagaagctgcagtgagccgagatcgtgccactgcactccagcctgggcaacagagcgagaacccatctcaaaaaaaaaaaattgttattttgttgttattgttgtttttgaagacagagtctcactctgttgcccaggctggagtgcggtggcatgatcttggattgtgttcttccagggttgcagagagaagtgcaacagcgtctcattgcaacctctgcctcccaggttcaagcaattctcccgcctcagcctcccaagtagctgggattacaggagtgcaccatcacacccagctaatttttgcatttttagtagagatggaggtttcaccatgttggccaggctggtctcgaactcctgacctcaggtgatccgcctgccttggcttcccaaagtgctgggattacaggtgtgagccaccatgcccagcctaagaataataactttataactatgaaaaatgtgttacatattcaccattttgccagcattaatctcaaagcataagttttaccttttggggataaagagatagattgtgttttagccatatgaccaatgtagaaacaagctaaggttaactcctcatctaatgaataggcccgataaaaaagttggttgaccacaacatgaataaataaataaccataagcttggaaatgctacctgtagtatttcagagtgtcgatcacatttgtagtcatcacttaaagaattaatgtctgccaatgttatcatctaaaatgtatttacagaggtcagaagagctatgtctgtcctcctctatgcaaagaggtgatgacatcaaggggtatgtcacaagccaaagtttagttagcctaagttagttagctggtttgcagtttttatccactaagtctgatcttctgacccctcagttttacaactttccactctctgtgctgcatagcacctctccacttctgagttaatcatttctttgccattatctggcaagaattcttatctcttttgctgtcactttataacagggtcctcttatcaacctgcatagagtcatgtgatgagtcaaagcctatcaaaagtttccattcttctgattagaaaccatcatgaaactggatacatggtttacagcaggtcactaatgttggaaaaagtacagagtccagggaaagacttgcttgtaactttatgaattctggatttttttttttcctttgctttttcttaactttcactaagggttactgtagtctgatgtgtccttcccaaggccacgaaatttgacaagctgcacttttcttttgctcaatgatttctgctttaagccaaagaactgcctataatttcactaagaatgtcttctaattcagatactggggatttacaagagtctttaaagcacggacttacacctattggt

SEQ ID NO: 12769 - DNA, 2637 bp, Homo sapiens
agcactgtatgcagagtcgagggcgggacagcccggtgtgtgaggcagatggagtgcagatcgcatcttggtgacctggaagtcagcagccgtgggtgtggagggcccaggagggctgaggaacctcggggcatgggggagggaggctggacaggagagggctcacccaggccctgtcctctgccccaggtgaacctggccctgcctgtgttcttcatcctggcctgcctcttcctgatcgccgtctccttctggaagacacccgtggagtgtggcatcggcttcaccatcatcctcagcgggctgcccgtctacttcttcggggtctggtggaaaaacaagcccaagtggctcctccagggcatctgtgagtatctcgctggcccacagcccgtggtaccctctgccctgggcagcgaagggagttgagaggcgtcggccgtctccacccacatggggcgaagcgtgttgggtggcaggagggttcaggtcactgcagtgtccgccagtgacacgcagcccacatggttcagggataagacacacagcgcagcaccagctaatctctcaggacgagggattccggaaaaccaggctactgctgccaagtaacaaaatcctgctggctgccaccagcggacacagcagacttacccagaaaggcagaaagaggcagaggcaggcggatcacttgaggtcaggagttcaagaccagcctggccaacatggtgaaactctgtctctactaaaaatacacagatcagctgggtgtagtggcacacacctgtaatcccagctactcaggaggctgaggcaggagaatcacttgaacccgggagacggaggttgcagtgagccgagatcgcaccattgcactccagcctgggcgacagagcgagactcttctcaaaaaaaaaaaaaaaggcagaaggagaaacccgccccccggccctgtgtgcagcggcagccccaggggtgctttgtcaccaagctcaggaccccgtcctcagcgcctgcaaatgtggccaggctcgtagaaaaaggccggggtgcttgcgggcctacatgctgatccccatgtcactgggtggcttggagaattcccgggatggcagcaacacaggcagggagaccccccacccctaccccacactctgatcaccgccagggtcatggtagaacatttgcctcaagctttgcagtgggatctgcattaactgtcattcaggacaccaagagcttaaagcaaacccccgtctctatcctgaaagcagtccccctccacagagtgatgtctctgtagacagtcccaggcgcgacaggtcttccgaggacccgttagcagattggcccctccggccctgcctgctgtgaacagtccaggcatgtgtccaggtggtggcccgggtgtggacctgcaggaaggcctgtcatccccccgttgcactttgctgagacaccagggcctggttcgtgtgccccaggggccgcactctgcctccccagggttctgaagcaggcgaggggtgggccgagtgggatgtggcacttccgcatttcagttgaagacagcgcctcgggcacccggcacccacatgcgcaagtacacaagggaaggttccttaaaatcccagcgctgggcagcggcgctgggtttggtgacagcagggctgggggagccccagctcacgcccccgtgtcccacgggtgcctacccagcccccaggctaacacagctgtcttctctcctgacagtctccacgaccgtcctgtgtcagaagctcatgcaggtggtcccccaggagacatagccaggaggccgagtggctgccggaggagcatgcgcagaggccagttaaagtagatcacctcctcgaacccactccggttccccgcaacccacagctcagctgcccatcccagtccctcgccgtccctcccaggtcgggcagtggaggctgctgtgaaaactctggtacgaatctcatccctcaactgagggccagggacccaggtgtgcctgtgctcctgcccaggagcagcttttggtctccttgggccctttttcccttccctcctttgtttacttatatatatattttttttaaacttaaattttgggtcaacttgacaccactaagatgattttttaaggagctgggggaaggcaggagccttcctttctcctgccccaagggcccagaccctgggcaaacagagctactgagacttggaacctcattgctaccacagacttgcactgaagccggacagctgcccagacacatgggcttgtgacattcgtgaaaaccaaccctgtgggcttatgtctctgccttagggtttgcagagtggaaactcagccgtagggtggcactgggagggggtgggggatctgggcaaggtgggtgattcctcccaggaggtgcttgaggccccgatggactcctgaccataatcctagccccgagacaccatcctgagccagggaacagccccagggttggggggtgccggcatctcccctagctcaccaggcctggcctctgggcagtgtggcctcttggctatttctgtgtccagttttggaggctgagttctggttcatgcagacaaagccctgtccttcagtcttct

SEQ ID NO: 12770 - DNA, 2636 bp, Homo sapiens
gaaccgtgattaaaaaggggaagaaccacaagtcccaatttaagtcagcagagctgctgtctgggcagtgagagggaaagtgcttgtggctggcagatttcagcagccatttggcattggctgggtaccgggctgctctgtgggtgctgcctggcagctgcatggctacagacaagtaactgttctctcttggccgcagtgtccccaggtataagaaagtgatcaaataatatgggatgatccattcagactttttttttttttttttttagagacagagcctacctctgtctcccaggctcgagtgcagtgatgcaatcttggctcactgcagtgtccacctcccaggttcaagcgattcttctgcctctgcctccccagtagctgggactacaggtgcgtgcaaccatgcctggctaatttttgtatttttagtagagacagggtttcaccctgttgaccaggctggtctcaaactcctgacctcaggtgatccgctggcctcagcctcccaaagtgctgagattgcaggtgtgagccactacacccggcctcgtttagacttcattgacattcccccaccccacccctcttcccacatcctcagatgccgtgtgaacagcttgaatcccacactccacaggtccttctcctcacaaccctccatggcaccctactgccttcaaaataattcccaaagtccccaccaagaccttcaagacaccatgtgatgggcccacctttgaaacatcatctcttaccagtataggtgtcaccactgcctttatgactttattccaaagcaccacatgtattcccacctcagcacctttgcacatgctgttcctttggcctggaatgctcttccctcagacgttatagcacctggatccttcttgtcatggagggttctaagctcacatgttagttccgcagaggtgtccttcctgagccctggatctaagacatccccttccagctctccatcccgtaactgttttgtcattgtcatagctgatcccacttgcttattcgtgccttatgtccccccactagaatatcagctccacgcaggcagggatatctgtgttgttcactgctgtgttcccagcgcctagaacagtgcctggaaatgtgcggaaagcagatttttgtggcctttttcttcaaggtcattggacaccaggaatcctgtagcagaccgctcccttcccccatctactcggagtctggaaatccccaccttctggggaaccccttcctgtagttctaaggtcaggactggggccgatttgtttaacacagagagcttcctggagccaagcctcgagctaactgctttaatgcattaactcacttaattctcactgccaggagagtgggtacacattatttccatttcataggcaaggaagtggagaggtacggagaagtcaagtcatttgcccgggtaggaagagggggaggcagtggaatggagacacttgctgcctgggaagactcgaggtggcccctccaagctgggggcgtgggcgacttgtttcctgttgggggagggggagaagagtacattcctccctccccgccctcccacatgttgggggagaggctggctgagagcatgtcccactccggactagggggaaccccactgtccgtctcagctccccatgaggccgtggagaaaatgtaagtagcccgggggcgggcaggggggtgggcgcagaggccacggaagccagcggtcggagagggcttcctggagaaagatgcacccctcctagaattgggggacaggacgggcggccggagcgaggctgggctatacgggcaccggctgtagcaaaggcaaagctgagggctggggccagaacccaaatcgggggcctggggccgtggcgggtcgggtcagcatgatcgcagatagtcagggtcgggcagggctgggctccctccctggggcgatgatgaaagccgtggtcgctattgcaccgcccagccctgcgggcactgataaggccctgcaggagggagtcagcaagggcgcgccccctggaggccaggcccctcgaccctgcccgccctaggccccgccccttcatctggccccgcctccaggcgctgaggcacctggtgacctgccggcgttgagtgggtggggctaaagtcgccccgcccctccgatcctcacttctatcttcagactgtgggacgcgaaatcgggtgggcacgtggtgggcgtggcttcgcaaggcctcgcctttttccggacccgcgccaggagagccctccgaccctggcagccgcggactagcgggattggtaggcggggccagtccgggctccgccctcatggcccgcccctccagccgaatctccgactcgcgcgcggcctgaggcgtggctcctggtggccccgcccctgccccgcccctgtcgcggccggcctcccccgccgggctccgctcgcacggccggttcctctttacataacggcgcggggcggcatgggcccgggccaccgcctccgcccggctgcccgcccggactgtcgcggcccgcggtggcgacggcggccgctgcaaagtttccccggcggcggcggcccgggggcgcatcctcccgcaactgtcaag

SEQ ID NO: 12771 - DNA, 2608 bp, Homo sapiens
aggatggagtgcagtggtgtaatcatagctcactgtggccttgaagtcatgagctcaaagattcctcctgcctcggcctctcaaagttcagggactgcaggcctatggcaccatgcccaggcccccggtggttttcaaatgctggtgtgcatcacgctctagagccagggtaggggtggggtttgttaaatgtacagggcttgctgatttgaactgttgacagacataaagaattatccatcagagagagcctcgttatagcatgttccacatcactttgactggagggaaagccatggttaagcccagatgaaatgcgggtggttggttttgaaccccacctctccttcaaatggactcttcccgatgcacctaatccaccttttttctgacccatatatccatttctttccatttcccttccctacggcctcctctttcctctgtttgtttcaagattgtgttcttttagtttcccaaattgaccttcttagctaaattcatggtgggcatgggttttgtcatgtttccccagcagctagagcctctgtaaaattctgaacacaaaggctctgggagaggctgaagcctgtgtagcactgggggtctggaatccattaagaacaaggaacacccctaacaccaggctgagctgttggtgaggcatgttctcagcctccagccatttgacaatcaccatggcccagtgaggtgggcagagagcaactgctgtggttgtttttcaaatagagaagccaggcacttgcgaacaggaccctcacttcgccaaccccagattttccattgctagagcatgtctcagctgggccttgaaccttggtcttctggcagttcagggtgggatgatggaaagtggctttgctcatgacttagcatttaccaagagcttctcatgggcctgggtcccagagtcatggactcacagtttgggatggttacagcccccacctgtgatgtgattccattgtgttacattgggcaagtcaaccccatctcctggtttccccatctgagagtgaagggaatgaatattagccttttgtttacattttttcttttgtttaattttaaagcttcatatactatggttccaaatgtagggccaaacccaggactcctgtgcgcgagtcctgaactcactccttatctgcgaaatggcctgaaaacttcagccttcacttagcccatggggctgttgtaagaatcagaataatattaattattgcaaaggtgatgtcaagtgtaaaggttatatgagaattatcttggtgaacatcaggaatcgtttgcttgtgctttatgagaacagcgggttttgatttaagatggtaaacagcgattcagctttcttccctcagggcttaaagaagacatgtgtgaccatggaccaggaacgcccacgctctgacctcagcataaacaacagaaatgatcttcgaaaggttttgcatcttgaatttctctataaggagaacaaggtatgtgctttctaaggtgtggtgtggagtcttggaactgagtttggcactgccaaagcactcatgggccctgccagtgacaggagaggcttgaggttctcctggcctgtcacacttgcggtcagagagaaacggaccccccaaatgtggacagatccccagcgggagtgggttttccatctcggtcagctggtgccgcccattggcgtgttgtgtgtgtgtggttgtcgggctcattttgaacagagcctgtggcagtgctcagcctcccgcagttattccctgtgctccctcctcccaacatgaggctatttttagtaagactgtacttaagaatatcgtatccagttatactaaaattttccatgccctgcttatgtaagagtttccttcttcagttctgagtaataccttagtcttgagtctcctgtgacatataatttaggtagaggagggaattgggttcagctaacccaggtgcattagagttggaaaagcaaatggaactgtgttttcttgggcgggaagggggcttctctgatcccccagacttgatctcccccaacctgctattataggctttcatggcaccctctagttttcctgtttttgtgtttatcacattggcaatagaatatttatgtgattttaaaattagtatctgccccccgccaataccttggacacagcagaagccagaaatgcagtcttttttgttcactattttatccccaaacataaagtgttgtccgatggcatagtgaaatatatttgtggaataaatgaatgaatgactatacgaatgaatgaaactacactttctacttaaatttttaatttgttatgaagacagaaaaagaatgggctgtccagcaaatgttgctgtgtggttgggcatagtgtcagagtcaaaaagaaaatgatatagttcagcatttatcacaattttttaaaaaagcaataaaatgatatctcatgtggaagtccaatatgcaaagcaaagaagggaaaatgccctatttgaagtggggaaaaggaggtcttgctttatcgtctagcctctcagcgtccagctttaaaccactgatcaattcccttctctcaggagg

SEQ ID NO: 12772 - DNA, 2607 bp, Homo sapiens
gcgtcggtctgagactaaaagaaatttgtggacacggacgcctagtcaaatgaaagaccattttaacacattttcaatgtatttaaatgtgcgggacttaattgtcagaattctcccgcccagtgtagcccgttcacattgcaaatgacttggctgcagtaggcacagaaggtccagttccattttgacccgccccgccgcgcggcggactcccgcgatgctcctctggtcacggacttctccagagccgcttccctccggtctccaccgctgctgtggctatggccagtgggaggactgggtctccgaggcaggacctttcttggagtcgcggaaccccagcacagtgcctcgagcgctccagagaaggagcggttggatctttgagcactcaggttggaggggagcgtgtgtcgtacccgggggacctaccgggaacgttttgggaaagacagtccctttatttaggtacctggtttagcaaacaaagccccgaggacgctttggggatgctttccaagctttgtgacacctccagaagttgaaccattccctcgcctttgggagcaacaagtttcactttcctgctctcagtgcgctgacagagggtccgtgagctgggacactgtgacctcggcaccgctgcgattccagcgcaaacctgcgtggcccagggggagggggctggcgcggggctgaggaaggcggggtgtaggtgacgcccgggccagccgggcacaccaggtccgcgatggagccatctgcactgggaccttggtccttgttccctgaccttgcgccgagggaccaggaaggtcaggtgctcgccccgcgtcggtgcttcaggagggaatgtggccagaacgagaaaggtgagagcaagcggcacctaaggatttttgcaccgaaaccacaatttctagaaccatccctttcccccagtcctggtttttttttttttttgcacggtgtgtgtgtgtatatgtgtgtgtgtgtgtgtgtgtgtatgtgtgcgtgcgcgcgcgcatttctctactttaaagcacgtttccttttttgaagccaggagctggagagcgtggaaagggagaggcggtgatcgcacaggcacgcggcgtggtgggggctcttgccggtgcagacgtgggcgatttcagctttaaggaaaaggcagagggcctgcggggagtggtggttagggacaggggcgcgatgggtagtgaaggggtgcagggaggagccctgatgtaagaatgttaatgagagactcccccagcccagcccccacatctccccacccccacccaccccacccgctggaaacacaagcccggcctcggcgcgccatgtgtggtaacacgctcagccgctgccacgctatttaaacgcgggctatggatccaggaaccggcgcgaatcaatgagatcaaatgcgagggagatgcaccgtcaattacaaacacttggacaagtctaactttttttttcttctacaaaaacgctttcaaaagcaaccttagcaacgcccaaataagaagccacctctaagcaaaatagtatatgtataaacggagggcgaatatatacaagtatatatatatgtatattacagacgcacaggtttacacccggtgaactttttctttttctttttcttttttttttaagaaaaactagtgacattgcagagaaggacgcttcctctctatcttttggcgcattagtgaagggggtattctattttgttaaagcgcccaagggggcgcagggaccttggagagaagagtggggaggaaagaggaagggtgggtggggggcagagggcgagtcggcggcggcgagggcaagctctttcttgcggcacgatgccgtctctgctggtgctcactttctccccgtgcgtactactcggctgggcgttgctggccggcggcaccggtggcggtggcgttggcggcggcggcggtggcgcgggcataggcggcggacgccaggagagagaggcgctgccgccacagaagatcgaggtgctggtgttactgccccaggatgactcgtacttgttttcactcacccgggtgcggccggccatcgagtatgctctgcgcagcgtggagggcaacgggactgggaggcggcttctgccgccgggcactcgcttccaggtggcttacgaggattcagactgtgggaaccgtgcgctcttcagcttggtggaccgcgtggcggcggcgcggggcgccaagccagaccttatcctggggccagtgtgcgagtatgcagcagcgccagtggcccggcttgcatcgcactgggacctgcccatgctgtcggctggggcgctggccgctggcttccagcacaaggactctgagtactcgcacctcacgcgcgtggcgcccgcctacgccaagatgggcgagatgatgctcgccctgttccgccaccaccactggagccgcgctgcactggtctacagcgacgacaagctggagcggaactgctacttcaccctcgagggggtccacgaggtcttccaggaggagggtttgcacacgtccatctacagtttcgacgagaccaaagacttggatctggaagacatcg

SEQ ID NO: 12773 - DNA, 2598 bp, Homo sapiens
tgatttgaaagcaggaacaaacaaatgtcaagaaaatgcacaaagcacatcaactagagacaaggcacacatcaactaggaatgttacggaacaggactgaggcagttatgaaagggagctggaaataacctaggtcaaagcagcctaggagaataatctgccatggtttgaatgttcctcccaaaactcatgttgaaatttaattgccgttgtgacagtattaagaggtgggacttttaagaaatgatgaggtcatgagggcttttccttcttgaatgggtttatgccattattgtgggagtgagttttttattccaggcattcggccaccttttgctctgtcttgcatgcacagctcctcatcatgtgatgccctccaccatgttatgatgcagcaagaaggtcctcaccaaatgcagtccctcaatctgggacttcccagcctccagatccatgagccaaataaatctcttttctttataaattatctagtctgcagtattctgttatgacaacagcaagtgaactaagacacaatattaaattaaaaaacagtcactcttcaaggttgtgtggagaaggggtgatagctggaggggaagagtaggaaataagggtggccaagagctgccccagggacaaataatgtttaatagcatagcatggtaatgaggaagtccaacagaacagaggtccagttttgtacgtatgtggctgtggttcaataaatgtgaaatgataactgtcccatttattcagggtcagagggagaagaaaaaatggtaggagtgttcagattggattttagacgtttaacctgaacattcagaccaaagggtgtgcatctgtgcactcttgtgtcagacttctagaatatttgaagtcccatcacctagcacagtacttaacacatagtaggtgctcagtgattgtgagagaaatgcaggaagtatatctgtgatcatcgagtgataatggagtgagcgttgcagccaagggtttttgcatccttgagatttgggggtctctgtgattaaaagaaaaagaaccaggagccactaggtgtttaagcaaatagtgacaaccgccccagcttctgctctggggccctacctgccccatctctgcctgtgaaaatggaattgtggtgtgtctgcaacccctctggctctgccacccgtgctcctggccttgcctaagtgactagtcacctatgatcaaacagtactgtcttgtgctctgtacctgccccacaatattctggctctatccaggaccccgcttggattcatgaatggtatctttattttccctaactctgagtcagcagctcagaggagaggcccaagcttcttgtcccaccatcaccaaatgcaacaccactgaatccccctgtacctcaaaatccactgtgcctctagactgtctagagtagggcttcttaaactttaaagtgcataaaatctcctgggcagggagactctgaatttctaacaaattcccaggtaatgccagtgttttctgttataatacatttgtttgcattttctagaattgtatataaatggaatcatatagtatgcacgattttatttgcctggcttctcttactcagcataattattttaaattcatccatatttttgcatacatcaatagttcatgcttttttattgctgagtagtatacaatttgttccccattcacctgttaatggagattttagttgtttctagtttttgactgttacaaataatgctgttatacatttgtgtgtacgtttttgtacagctatatgttttgatttctcttgggtaaatacctaggagtagaaaggctagaagttctgtaggcatctatttaaatctttaagaaactgacaaaatgttttccaaagtgtaccattttacattccaaccagaaatatatgaaagttccagttcctccacattttcattaacacttgatatggccagatgtgtaaattttagccattctaatagaagagtaattatctcttattgtggttttaattgcatttctctaatgattaatgatattaaacatattttcatatacttatatgccatctgaatatcttcttcagtaacgtgtctgctcaaatcttccacccatttttttttcttgttattactgagttttcagagtgcttcattacatcctggatcaagtgttttcttagatagaagatttacagatattttctcccacttgatgattatcttctcattctcttgaaagtgtcttttaaaaagtaaatttctgtccattttgtcggtagaggcagaaggagaaggtcggattgtagaagctggggtggccggcagctcgctcatcggtgttcgtgggctttgtcggtccgtgcctcgtctctccctggaaagggagggaggcttcaacgtcgagagggagccgctgccgcgttagttccgagcttgaagtcactaggacttctctcaaacttgagtgctgaggagactcagatgttggcctcagctcctaggctgaactcagcagatcggcccatgaaaacttctgtattgagacaaaggaagggatctgtcagaaagcaacac

SEQ ID NO: 12774 - DNA, 2596 bp, Homo sapiens
tcaagatgccaaaacaccactaatggatctttaggtcttggcttacttcatccatttgttcacagatatttattaagcacctgccatttgtcctgctgaacaaatcaagcatgttccccgcagccattgtgtacagctaagcaggtgaatggcacccactggagttgcgtagtgcacaacttccactactgctggtggttcttgtcctcatggagattaaatttagtaacttctaggaagtctttctcgaatctctatcctcttgctcagactggaaaaagtgctcttattatgttttcttttctcttttctctttttttttttttgacacagggcctcactctgtcacttaggctggagtgcggtggcacgatcacagttcactgcagtccccacctcccaagcttaggtgatcctcctactgcagcctcccaagtagttggggccacaggtatgcaccaccacgacaggcaagctaatttttttgtattttttgtagagactgggttttgccgtgttgcccaggctggccttgaactcctgacctcaagtgatctgcccgtctcctgcctcagcctcctgagtagctgggattacaggaatgcaccaccacgcccggttaatttttgtatttttagtagagacggggtttctccatgttggtcaggctggtcttgaactcctgacctcaagtgatccgcctgccttggcctcccaaagtgctggaattacaggcgtgagccacggtgcctggcctctcctcacctgctttaattctttactcaaatgtcacctttttactttgaggtttacttttacctttggaggtttggagtagaggagggatactatctgtctaaaaagaaaaacaacatttagaaatataacagtatgggccgggcatggtggctcaggcctgtaatcccaggactgtgggaggccaagatgggcggatcacttgaggtcaggagttcgagaccagcctggctaacatggtgaaaccccgccccccacccgtctctactaaaaatacaaaaattttcccagggtggtggcgggtgcctgtaataacagctacttggggggctgaggcaggagaatcacttcagcctgggaggaggaggctgcagtgagccgagattgcgccactgcattccagcctgggcgacagagtcagactctgtctcaaaaaaaaaaaagaacggtatgagcaaagagtgagtaaggcagttatcagatgtctactttgccaggaatcaggctacagcaaataaaggtttatacataatattgataataaatgcccagctcttcccctgtaaaactccaatactctaagatttttttcatgaacaccgccccccgctgctccgacccctgcttttttatttatttatttatttatttggtagagatgaggtctcactatgttgaccaggctggtctcgaactcccagctcaagcgatcctcctgcttctgcttcctaaagtgctgggattacaccgcgctcggtcctgaacacacattttgtttgtttgtttgtttgtttacaaaacccctggagaacccgcgtattctaacctgggctggtttttgtatttttgcaaaataacaccccacacattctcgtatcagcgtgcagatttttttgcacccagtttggttgtttgcggccataagcttttctttaagcctttccaacccgtccttctagagaaagtgtcttcataaggaagtcacactgctcacgcctgtaatcccaacactttgggaggccgaggcgggtggatcactaggtccggagatcgagaccatcctggaaaacacagtgaaaccccgtctctactaaaaatacaaaaaattagccgggcgtagtggtgggtgcctgtagtcccagctactccgaaggctgaggcaggagaatggcgtgaacccgggaggcggaatttgcagtgggccgagatcgcgccactgcactccagcctgggcgacagagtgagactccgtctcaaaaaaaaaaaaaaaataaataaataaaaaataaataaaaggaagtgacactggataattaagagacacaccattgcgcctttaacacatattcacacccagcactgtcacatccatcgtgccttgaggacaggcataaatttacggccttcctcctgcgctcccggcctgctcctagcctttgactagagcctgcgcagcatcccagtcccaggctagggcccaccggtgccgcgcagcctcctggaagctgtggggagtagcgttcctccgctccagaactacaactcccagcaggccttgctcctctccacctccctcgcagcgcatggcctgccgggagggggcaggtagccggcgggcccggtccaatgggtgccggcttccgaggagagggcggaggagaggaggaaggaggcgaactgtgggccccggccccattcattgccgtggccggcgggcactggggccccgtgttttcagagtcatggaggcgctaattcctgtcataaacaagctccaggacgtcttcaacacggtgggcgccgacatcatccagctgcctcaaatcgtcgtagtgggaac

SEQ ID NO: 12775 - DNA, 2596 bp, Homo sapiens
cagccttatgtgagaaacaagcagtacaaccagtgcacacatggtggtgctggcccgaggccagagcagggactcttcctctgcatagtgagaaggcagtgagaaggcaatgtgtggggtataaaggcaggcaatttgccagatttgctcatggaaaacggagttattcttttctgattgtttctattttctcagtgaattcagagtcaaagtgatcagctgagaatgagtagaaaggggctatggcagaagagaagttgtgactagccctcttgggatgggagagcaaatggactgggaaaaggtagtagagttaccaggccatggtgagggtccacttgagatgtatgtttgtaaatttaaagctaacaagttagtacaaagttgtgtttttcttcatctatgtttagctgctcagatgcaggcgcagagtagattaagagttgggtttaaccaaaattgaaggtttgctaggccagtccgacagagagcacaaattgcaaagtgtgtgcaagggattgcttatggtgaggcaccatggttaatctgatctggataaggagagaaaagaggtgatgaggtgtaacaaatgctaaaaacatagaggagtcagtggtggtctcagtgggagaaaaaggtgtgagggtactttaaacaggagcagggaatatagaggtggttggaaattggaatgcatgaaactaaaatgttggaggtggcatagacactgtaataacaaagtccacattatgactgtggagtgggaggctaaagtcatgtccatgaacacggacatggctgtgggagcttcagtgagaggctagggcaggtgaattatcttatgtggagattgacatctcacatccattgagatgactgatggtggagaggaaagtagtgatctatgtgcttaaattttatcaatgagggacagtggaacatgacagttagttgactgcaagaataagggcactgggtggcacagactgtagcatgtgctttaagacagcaggggttttgagaggaggaagaggagaaataccctggaagagatagtatgaagcaaagaggacacaggccttgttgtaagcatttaaagtgcattggattgacaagaagcaacaggtatttcagagaagagattggaaatgaagaatttcactgacgacagaactttgcaaaaggctgagtgtaagagcaggaggtgacacagcaaggtaggagattgagttagaacaccaacacaccaagatatatggagataagaatttaaagataagatggaagacctagatatcctggactgctgggggcacctagacattctctgtctgtaggaacatgaagtcaactatatcctcctaaagcaggaaccactccagctcttttctgtgttccctacacactcatattagacagggggttggtgatggggatgactgaatgaactaaggagtgaatgcatgactcacaaaaggtagaggaagattggtgctgtgggaggagtggagggagacattcatttggaaaatcagatggcaggagcctttttattgagtagtagaagagcaaagcagaaggaccagaatctggagtcaaaagacatggttgagttctcattctgcaacttcctagctgcaggtctttgggaaaatgactcctttatacataactctgacctcatctataaagtaaacctttcctccttaggagattgagcttcaaactgtcacctctttgaggctcctgtccctttactacaacactaatttcatcccacttggaaattgtgtagagctgtacaagtaaaagggtggacaataaacaggagaaatatagtaggttccacatactctaacgcccagcccttggcctatgtgccaacactcactcccaactccttgaaaagctactattaaaagagtttccctttggtttagaaagatgtttcttataatgcatagcacattaaaataataacaactaacaccacagagaggagtgtggaacacccagtgagagtaatacagataaggagccagggtctaaaacaagacacatagggttaccttgggatgtgatacaacaaggaacatcataacctcctgcttaggtagctgggcagaatcaaggctgccacagagcctgatggagtaggaggaacaatgcccagccattcccacacatgctcaggagcagggcagctatgtacatgttggagagatgctgtttgtctttgactcgcccgtgttctgagtgagccctttgacccagttttagaagcagactgagccacggtgagcagaggcggggcttagggaggcaggagtcttggggctttataaagtcctgccgggcaccactgggcatctctttcaaggtttctgctgggtttctgaactgctgggtttctgcttgctcctctggagatgcagcgtctgttgactccagtgaagcgcattctgcaactgacaagagcggtgcaggaaacctccctcacacctgctcgcctgctcccagtagcccaccaaaggtgagtcactttctgagaagcaccttgtaactagtaaaagatagtttttccctgctattgggg

SEQ ID NO: 12776 - DNA, 2579 bp, Homo sapiens
ggcaaaacaagatggctattgacaactgtcgggtttgggtgatggtgtcatggggcacactgcctctctttgtgtatatttttaaacatgtccatttaaaaaggaggttggccacagtggcttacacctgtcatcctagcactctgggaagccaaggtgggaggatcatttgaggccaggagttcttgaccagcctgagcaatataatgagatcccatctctacaaaaaattttttttaaagtagctgagcatagtggtggacccctgtagtcccagctacttgggaggctgagaaagaaggatcgcttgagcccaggaggtcgaggctgcagggagccatgttgtgctactgcactccagcctgggtgagagagtgagactctatctttaaaacaatgaaaattaaaaattaaaaaaatttaaaattttttaaaaagttacaaggacgatataggatgtcataacgcctaatcaattctcatatcttcatgggtttctggacagagaatgtaccttcactttaccattagcctaagatcactcaaaacatctggaagttattattttaaaaagaatctcagaagtatgcctgcctctcactgttaaatatatgtgatggtgcagattattcagagcagtgttaaggcatcaacataagtgcagccccatggagtcagggacagaggtcaaggtgaagtgtttctttacctttgaagacttctggcacccaggcttacacctacacttcagctcggcaatccggatgtcagggaagtgagaggcgaagtttgaacccatgtgaactgtacattttgggacttgagtattcaggaacttggctctctttgatgagaaattacttccctcctccatcggctcagcttttcttcttccaccttccctttcctccctctctccctcctctttccccttcctctcttcttcctctttcccttcctctcttcctccttcctttcttccttcctccttttaagtcatcaccaccaccagcactacaaaaacctatagcatgttcatgtcagaacttctaaagagttgttgtaaagattaagatacaagtggggaagaaagaaatttaaattcattagaataattttgatcatcataattaaaacaatttttctttattatggacactttcaagcatataaacatctgactaatccaatgaaccccttgtactaatcactcaccttcagtaaagttggccaatctctatttcatcctttcatctttctccccaatcatgtccaccctcctcctgaccccacctgagattacttcagaacaaatccaaggcatcatattgtttcatctgtaaataattcagcagtatttataagagataatctctcttattttaaacataatcacaatactatcatatctaaaaaaaataatttgttaatattataaaatattcagtcagttctcaaatttccctgattatctcctttttattcttggtttgttcaaatgaggacccaaataagacgcactcattgcatgctgctgaaatagctcttgtcgctcatagtctgtaggcttccttgccctcctgttttcttgccgtttatttattgaagaaactgagctatttgttttgcagaatttttaccattctgcattttgctgattgcatcttcatggtatcatttaacatgttcttgtaattcctgtaattacctagaattcctgtaattacctgtaattcctatcagctgatagttatacctagaagcttgtcattattagtagcaatatcaaaaacttcacttttgagactggcaatttctacgtctgacatcttaccacagtgaacaaggcagcatcccaaactcttctgagtcaataagaaaagggtaactcttgcagtaatgccaagttcagtttctgttcactttgcaaaaaatgtatgcccactactagacccatgactgtcaactagaatgtgctgggcctcctctcctgtctgtgcatgggaatgggcacaaccaggtggaaagaacatgaacttgggagtcagatagctctagatgtgaattctgacttcaggttttatgaagtacatagcttgtctagtgaattcatatctccacttctcagattccttgtatacaaggataatgtctgtcttaccaggctgccaagatgtacctgacatgtagtatgtgttcaataattgtttcttttccagcttaggttaaaaatgggaattttcaagaaaccacaaacccacagagtttgtttagatccaaacacagatatggcatttgccagcctcataaacaatagaggaggctttcaggcaagccccaagaaagcatgttcagaaaggggaaggaacgtggggacaggaactattgctccccttctctctttgtactcagaaaatccaggaaattcttcctcaagaaagcatgacccatttcagcctaaaagcgtgcttttctctggactgtgctggcttgagaacatatttcttttaccaaaaaatgagttcacagtaagtgactcagaagcatatggatgaaatttcctttaagccactcaaggg

SEQ ID NO: 12777 - DNA, 2577 bp, Homo sapiens
gcttttctcccaaattagcctgtacatattcacacatcagtacacactgatctcatttaagaaaattggtgcatacctttgtatgcttttaccataatttaagaagaagctgactactttttttaagtcagaaatactgggaaggggaagagcatggtggtggtgcacgcctgtaatcccagaactttgggaggtcaaggcgggcggattgcttgagctcaagagtaggagaccagcgtcggtaacatgatgaaaccccgtttctacaaaaattagccaggcgtggtggtgcgcacccgtagtcccagctatttaggaggctgaggtgggaggatggcttgagcccaggagagaaggttgcagtcagccgagatggcgccactgcactccagcctgggcgacaggccctgtctcggaaaaaaaaaaaaaaatactgcgaaggtaaaataaacatatatttaacatattatatatttgaaacagccattgtcacagtggataacagtcacaggtgtataatagtgaaagttcgttaaattaatatttcttcgtgtttgttgactcgtacaacccattagtgttttgattggttgcatttgtcttttcattcataactgctgaaaactttctccctaactaacctgaggaagtggtaaaagtcaaacttttttccggtatgaggccacccttggtgctgtctgtaattatctagacatggcagccaggatccaacagctttgcgttttaactcatatggtctttcctggcgaattccttgcccccctctgctccccacttagcttgacttcctgtcttttatcatccgcaatctatcaagatcctacaatgtgctcagtgtagggcggaacaaatcactgttttacctcacaatttaaggaaggcagggggctagtttttaagataaaaatcttttaacaaaacataaactccccaaaatttcctacaagccaaacagcattgtcacaccctcacaagctcttattacttacacagccaaatgactcaagattactaacgtttctattcataaggagtttgctggcctcagatcaacacaatcaagccctcccccaccttccttctctctcccctgggagactgacgtttggaactcacgccgcaccaggttttttcagaatgaagacgatgtgtgttcgctgctggaactgtttgtcctgggattttataaacacctcccccactcctttttaaagttctgtttttgaggtgggggaaaaggaggtcggaatctgtttagcctttaaatctcccaattcagaaatatattctaagaatttaatagaaaaagaccaagggctgtgtctgctatttactgcagaactgggtattcctatcagaaatcacctacatgtgtcaccaagatcagagacaaggatgagggaaacagcatgatccctgccttctggagggttacagttgaagcttccgctgcttctgcacttgacctcaaaacaaacaaaaaacccaccgcaaacaacaacaaaaaaatccaggcccacctttccccttggatctttcacttgacagctttctcggcccaaaataaggcaccctacatctgaatgcatccctaaggccttaccgcacccagtccaggaggcagtcctggcagctgccctccaccgaactccgcgctttttcacacacgctcgtggaaggagaaaaccgctcaaacaactggactcggcccgtttcctttcggtaacctccccacagcccaacacgctgtccccagacgctgcccgctcccaccccggtcccttcgtgatcctcccgcgcgcgggcggggcgggggaggagcgcgggggcggccgggaggggcgcggccgggagggggcgccgccggggcgcgagccagacacagagggccgcggaggacgcgggaggcgagcggggagccgaggtcgtgctaggatcccgcgcccaggggccttcgtcgagggaggggcgtggcggcggcagcaggagggcagcaggagctgtcaggctggcggttccgcgccgcggctccttctgcgctgcgcccgcaactctgggctgagaacttctcccgccggcccactcgccctcgccccgcgcactcggcgccaggcgactcccgcaccttgtacccggcccgccccgcctcctccttcggccgcaccactccccctgccggccgcgcttctctccgttacaaaggagggaaaatgagccgggcggcggcggcgcggcgcggggccaccacggcggcggcgagcgcggccgcccccggcaccacgtaaaccgcccccgcccgcccagctgcggcccaggccggagcggagcctgccgtcctccgcctgcctgctgctcgcctccctagacctgcgcgtcgcttcccggcccgccgaggaggtggtggaggaggaggcgccgctttccccgcggcgcgcgccctcgccgttgtctgagctgtgcctggaccagtttggggaagttgtcggggctccgcgtcgcccagatgtgtgacctcattgagccgcagccggccgagaagatcggcaagatgaagaa

SEQ ID NO: 12778 - DNA, 2567 bp, Homo sapiens
gccagctcatctagtctcctcacagccccctgggatgcggggatagggcgaggtattcccactgggacaggtgccgagagggaaggtgtctgcctggcccagggtagtaggagtgggtgctgggctcccagcactcggagccccggctgagtgaggctggccctgagacaggcagggaaggtcgcgccagggcttagtctcgccagccctccccagggacagagggagggcagcatgagcctacctcccagcctggcgtgcgtgggacgggcctgctgcctactgcctctggggaggcagaggcctggtgggtgtggagccctggccagggtcaccaggagtgggtgtgggcgacagggaggctgtgatgaaagcagacctggagaggcggcaggccgggtcccaaatgccaggctgggcaacagtgggggcctgaaggggctgggagccagggcgagggtaggacagacatgcacagccctgggagggaaagtagcggtgatagtatgcagccacccaaggcagtacctgtgacagatggcgctgttcccaccgtccctcaatgcatctgcattccacctgcctgggttccacccgtgtgctcctcactgtcccactcgggcacctccaggaggaactcccgtgagatccggtgcctgacaccccccgggcagagccctggcagcgctcccatcatcatcaacatcaaccgcgcccagctcaccaaccctgaggtgaagtacaactacaccgaggaccccaccatcctgaggatcgaccccgagtggagcatcaacaggtggggcccagcaacacccattccctatccccagctattgagagcagcgctgagccaggagctcttccactgggcacttggcggtggccctcctgcatgccgggtactatcctgccgggaagcaccccttgccaagagcttttacctgtttcctgtctttggggaaggcaggctttgcctggctgagctgtggcccacgtttccagctcactgggccccagcatcatttggtgacccccccacccctgtcctgttccagcggtgggaccctcctgacggtcacaggcaccaacctggccactgtccgtgaaccccgaatccgggccaagtatggaggcattgagagggagaacgtgagtccctgccctcagctgcccacctcggtccaggccttcacctgggatggggctcctgctaggaatacccgtgtccctgcccctgcccctacccctgccccttcccagcttatgccaaccttggctgtgcctggagacccctggggaggcacctgtcctgcctggcgggtagaaggtctggctctgggttgctggctgcacacacctctccttcaggccacatgtccctggtccacgtcgggtgggtggcccaggaccagccctgctagtgcctggcatcatctgtgcagggagcaggcagcccccaggccaggggctctgtcactgggagctgccgggccactcgcggaggtcccgcccagcatccccaccctgtgtctccagggctgcctggtgtacaatgacaccaccatggtatgccgcgccccgtctgtggccaaccctgtgcgcagcccaccagagctgggggagcggccggatgagctgggcttcgtcatggacaacgtgcgctccctgcttgtgctcaactccacctccttcctctactaccctgaccccgtactggagccactcagccccactggcctgctggagctgaagcccagctccccactcatcctcaaggtgggtcaccattgcccgtaggctgggccaagccagggaagaggcccctcgtcctgggctctggctcacccccatctcctacagggccggaacctcttgccacctgcacccggcaactcccgactcaactacacggtgctcatcggctccacaccctgtaccctcaccgtgtcggagacgcaactgctgtgcgaggcgcccaacctcactgggcagcacaaggtcacggtgcgtctgtccaccgggggtgcagagctgggagagccatgccccacctgtggaccctgccccactagcacagccccagctctgaccttgcccgagactcacccctagctcagagggcgcccggctccagtgcaggccctgccgtagccttcagcctgccacctccttgagccccccgagactgcctacccaccctgagcccttgccatgccagtggtgccctggctggccaggcgcctgccctgggtcccagtgtctccaccctggtgaccactctgtgcccctgtcggtgggacctttcccacaggcaggtgttgggggtgggtcttgcccatcgggaggggctcccaagctttgtggaaagcatgggaagctcctgagtggcctccacccactggcaggtgcgggcaggtggcttcgagttctcgccagggacactgcaggtgtactcggacagcctgctgacgctgcctgccattgtgggcattggcggaggcgggggtctcctgctgctggtcatcgtggctgtgctcatcgcctacaagcgcaagtcacgagat

SEQ ID NO: 12779 - DNA, 2565 bp, Homo sapiens
ggagaataaccgttcatcactgcagccatgaatctgccacactgaatagatatggtctgaaaatctaggaacaaatggaatcactttggaaacctgtaaattttaaagccgaaagggcgctccagggaaccaactacatgaagttctctggaagccacaggatgggaggtttggtgggggtggaggtgaccattgaattttacataggcaaatgtaagacaatcttatccatagacagaaaaatccaaactcaccgagagtaaaaggatgacagttgaaataacagctaattgttattaagtatttgctaagttccaaagcacttttcatagattagctcaattaattctcacaacagccctgtaaggtagggaccatgatcatctccagaagaggctaaataaattgccaaagatcacatatgtagcaagtggtggcagagtgaggattcatacctggacagcttaactttaaagccatggtgctaatgcattcattcattcatccatccattcattcatccatccattcattcaatgattatattggatgcctactacatgctaagaactatgttcaaggtgctgaactacagctgtgaacaatgcaagtacaaatacatgaagcagagttggggagaaagtaagctggagaaataagacataaactaggttagatggtgaacatgattaaggaaaaaactagagcagggaggaaagagaaatgtgcagggggaaggtcaattctgagtgagccaacaggcaaggtctcactaagaaagcggcattaaataaagatttgaggaagtgagggagtaaaccttgcagctatctaaaaggagagcatgagaggtagaggagacagcaaatacaaagaccctgaagcaggggcaaggctaatgagttctagaattagcaaggagtccagtgtaacttgaacagagtgatcaaagaacagagcaggaggaaatgaggtcagagaggtaaacaggctggagtgcagtggcaccgtctcggctcactgcaacctccacctcccgggttcaagcgattctcctgcctcagtctccctagtagctgggattacaggcatgcaccaccacacccggctaatttttgtatttttagtaaagacggtgtttcaccatgttggccaggctggtcttgaactcctgacctcaagtgatccacccgcctcaacctcccaaagtgctgggattacaggcgtgagccaccgcgcccggccaggattcttttaatcaagtatgatgcagccatcagggttggagcattctaggaagagggaacagcatgcaccaaggcaacaggaaagcacataaaaaaggagttgctggaagattcatttcaacccactatcaagtaaatattaaacttactgtataaaaatgttagggccaggaggggtggctcacgcctgtaaacccggcactttgagaggccgaggcaggaggatcggttgaacccaggagttcgagaccagcctgaccaacagggcgaaaccccgtctctactaaaaatacaaaaactagccgggcgtggtggtgggcgcctgtaatcccagcttctcgggaggctgaggcaggagaattgcttgaacctgggaggcggaggttgcagtgagctgagatcacgccctgcactccagcctgggcgacagagggagacttggtcatgctccctccccgccctccgtcagttttaggaataaatacctttttatttaagctaaagtgtgggtacacccttcctctaggattctccatcaaggaataagaagccatattaggacaatttagagggcagttaaccctagtagacatagtggttcttaaaaggcttggggcctcagactgtacacaggcttcacatggaatctgatttgttcctttatcccagtccctcacccagaacccgaatctagcccttcatgttataaaaagggccagaggtccaaagagggtaagtgccttgtgcaaaattattcaactactttgtagaggattttaactagggttcagttagctccgcccacactataaaaggctctttctaaaaaacgaaacatgattaagggcacacggctccagcgttaacaaagctctttgttagctgggaaatgcccccctccccgactcatctgcttatcatctgcatagaattatgtactcaaaagcaggaaaattattgagaaaaccattggtccccggctgcagaccccaaggttgggagctggttcccgtttcctcccagagccggcagggggggcaccaggcaaagtttgcaagacgcgcctccctcccacccctcccccttcctcgcccaacttcccatagccgcggcctcaactaaaagtggccattgacctttcaagctttcgagcagtgatgcaatagaatagtatttcaaagaaaaatgcttatcgaaattttggatccggttttcccgtgattgttaagggtttcttttaaaaagtaggtcacatttcaagtaggtcatatttcgggggcgggtgcgcagacaaggagatgagtttccactaaggcca

SEQ ID NO: 12780 - DNA, 2558 bp, Homo sapiens
ttttagtcagcactgggtgtgaagtgggccctatgctttatgggtaaaatcagagaaagtggatgccactctgtccttaggaaacccacagagaggagagacagtacgggggccaagtgccataatggagtcctgtgatagtgcagaacttcaattagttctgattagggcacagtttctacttctaggggccatccagccgacctcaggggtttcaggtcagcttttcatcctcaccccgcccccgcccctgggataaaagacccatattgcctacagttcaaacatctgcctgattatcctagcagagtggtaggaactgattttctgatctcctctactacccgcctcacctgcacagagagtaccagctgtctcagcctagcttcttcagtgggccttggctgtaaaatgtgtgtatccaccccaggtaattaggttagctctttgtgctcgtatgactgacccctaccttttaggccacctggtgtttgttctagaagttattcctataaacagattttcacctaaaatttgaatctttatgaatcaaataaggaaaattttaagtaaacttgggctgtggataactgatgattcattaccaaaaaggtagtcatttaaaattataaaatgacacaaaaaatttaaatggaaaacatcctgtttatgcttggtcaggtctttgagttgatgtgactcaagtaacatctgatcattttcttaacctttttaaaaagactcccctaaattcttcctcccaaagattttactgtgtttgttcacagtgggttctgtgaaaggattattacaagcccacaatccattatcctcaattctacaaatccaaaaaattctgaaaaccaaacattctttttgtaactcattcatcagcaaaaccagacctgaaccaaagtgaccctattcatattctttgattatctgtcctactgggacatatatggtttgctgcagaaatattaatgtatttaattataggatactgccctagatagttcatatatgtggtatatgcaccatactgcttttctaaattaaaaaatctgaattctaaagcatatctacttccaaacatttaaatcggacttgtggacatatgtaagtataaagcagcctttgcagagtggtttaaaaggctgctttactattgtggggagcttttaattttgataaactagtgagttcatgtaaataaaacataacaaaaacactaatccttaattttctgttaactcgagaatacccagatatgatagttttgtggctaggggttagacatagaaagtgtaactatgaatgcatgtatctgtttgacttcttgtacccccaaaataaaggctaaaataaatataatcagctaaccaaagctatagccacagtcatatatactgtgtaagaaaaaagcctctgatggaggttgcagtgagccgagatcatgccactgcactccagcctgggcgacggggccagactgtctcaaaacaaaagaaaaaagaaaaatgggaattgtgtaagcattcatgtataaaaaaatgatcaaaaatgttacactggcctggtgcggtggttcacgcctgtaatcccagcactttgggaggccgaggtaggcggattgcttgaggtcaagagttcaagatcaccctggccaacatggagaatccccatctctacgaaaaatacaaaaattagcctggtgtggtggtgggcgcctgtaatctcagctacttgggaggctgaggcaggagaatcgcttgaatccgagatgtggaggttgcagtgtgccaagatcgcaccattgcactccagcttgggcaacaaagcgagactccatctcaaaaataataacaatgttacactgtatcttgtacatttttagtgggataaatgccaagagcagttttattagttcttgattcctccacactttaagagaatataagttcgtctacccatgattttaagaagcaaagagtgtgatgtttcccacctacccacacccccttaaaactattcaaatgaaaccatttaattctttaattatagtggaatagaactgacctattttctgtatgatcataaagaaatatttacttttaacgcagaaatttttttcttaagatccacattttccagcttaatgaagtgattgtgtttttacttggactcttccctttcctttttccttgttctgtgcagattatcaacgcctgatgactgtggcagaaggcatcaccacacttttgttcccatttcaatggcaacatgtttatgtgcccattctacctgcttctctgctacattttcttgatgctcctgtcccttatctgatgggccttcagtcaaaagaaggaactgaccgttctaaactagaacttcctcaagaggtaaaactacaatgaatgatgaagcatttgctgtttgctgatttaggtcaaggcgactttcgttagattgcattgtctttgtcaaaattttatctgtctctttgactctcctaaatctccaagtatggctaggggagagcctgagctatagaa

SEQ ID NO: 12781 - DNA, 2555 bp, Homo sapiens
acttccttggcttcaaatccttctgatccattttaaaggatcccctgattagatcaggcccacctaggataatacttctgattaacccaatgtctactgatcacggatcttgattgtaatattccttctgctgtataatgtaacataatcatgggggtgagatcgcaccatttgtgtaagtccagctcacactcaagggaaggggattgcacagggtgtgtacgccaggggatggaatgtagggaaccatctcagaagtcatcaggatctcctgctctggagaaagccagctgccataaagtgaggacactcaagcagccctgtggagaagtctacatggatggaaggaggtctcctattagcagtcatccagaacccaaggcctccagccaacagccatgagggaagccatcctgagagcaggtcctccagccccagttgagcctgcagatgatccagccccagccgacgtcctcactgcaacctcttgagaaaccagagccacaaccacccaagtgagctgctcccagattcctgatcctcaaagcctgtgtgagataatcaattttttctgtttggagatgctattttctaaggcaactggttgcacaacaataaataactaatacacagcctttattcactaaaagagtaattaataaccatgggaaaaaggtgcatcgaaacatgagaagagaaatcccagcaaaggtgccttcttcccctctctatcttcacaggcagagctcaactctgggccttgtcacacccccagttatgctgtggtcaccactggatcccttccacctctgtaagggcgctgagccatcctcccaaacctccagtctcaacccagtgccctgctgcttcatcccaagtttctccccagtgttttccctggttcagactcataactcattctactccaagtgccaagctctccagcctgaatgcccttctctggactcattgcttttcttgcagtggccttgtccctgcttgtgccttcaagctgggctgtgagctggggctggcttgaaggccactctcagcctccaagggggtgcagctggggcttctcggccctgggcttaaggccatggctacagtcaagccatttcccagtaggaagtaaagcacttaaatctgggttgttttcttctcaagctgtaaactcagcactagatgacaaatcgcagcacccccacatcctgcctgcctggcctcccacgcctcactcacgtggcaatctccagatagtgatggggattcccgagggcatgcaggggccagatgcccacttgtgccctgtgcctgggtgagtgaggtgtgcaaggtgggcctctgttctgctgccagcccagccaatgatggcaaggacagagggttcaaagctctgacccccattgtaaacagggggcagaggagccgcccacctgagcagcatcagatccatgcaaagtgccaggtggaggtgaaacacagccagcgacacgactgttggtatttcgggtcaactcaccttgagctggagggagcagtcagcctccaagaaggcacgacgtgacacagtccagaccccttgcccgcctctgctggccgtgagtaattggcactaaacacgggatgcgtctgggtttaatctaatctgagctcaattacttgactccgctgatggaaacccgcccaggctccagtgcttcagtgaagagggcgctgaggtcgcctgctcactgcagcctggggtcctgttccttctgctggtgcaggtgtgcagctctgatacgcagcgcctgatgggactgcagggacaactccaagagcagggttctctagctcactaggcttctgcactcattgttcacctgaacccagggcacacgtgggtgtgggagggatgcaggggagaccatgtcctcaaggtttggtgccaagatgggggccccaaggcacacacaccttggttggtccctccctcatcactgctatggaacagggcttagcccacgcaccgggagaggctcccatagaagccctgggagagacccaagtcctgggagagacccaagtcctggctctgagccaccctctgctccccactttccttcccatctgcgtttgattttctgaggccagcctgtatctcacagtgggagccattcctctcactgtacacagacgccctgggcctggctggggagtccctaatcccaccccatgagcctctttctgccttgtcaggcccacttctagcccatgctgttgaggcatctctgctccatccagtccgccctgcactcagcagctcttggtgtggaacccatccaagtgcgccccggggctgtttggatgtgtgggttcccgagtcggcctgccctcagcacccagctgcacaggcttggtggtggcggcagggtgagagccctccccactgggtctcctctgtatctatgggaatgggctgcggctgcctacagaggagctcagcccatccccatctcagggctcaggctgggtctgcggggcgcaggcaggagagtataggccagggcttt

SEQ ID NO: 12782 - DNA, 2545 bp, Homo sapiens
aggcctgcctatgctcttctagtgagagcagtcctggctgggccaaggacacaaagatgaactcagtattgtcctgtatttcagggtgtgggggtgggtgagcacaggtgctaaaagcagcttcttacaacaatttggaagcatgacctgaaaccccctctcctgtcatctcccaggagccacctgtgttctggcccccaagttctctacttcctgcttctgggatgactgtcggcagcatggcgtgacagtgatcctgtatgtgggcgagctcctgcggtacttgtgtaacattccccaggtgaggctctaagattagggctccatggtgaacacccaagtatgaaatcccaggtaaaggtctcaggtaaagattcaggtactgaactcaagtccctcagataatacacctcatgcaagaaccccagataatgagtttcagacaaggcttccaataatggtttctttgatagctgtgctaccttgagcctcagtgtcctcatttggaaaacagggataatagcccctacccctatcatgagaatttccattaaaaattaattaattaaaattaaatttccattaaattaaagttctaggtaactactcttaggtgagaccccagatgaggcctccagtcacctctggtaacgtcccccaggcaaagctctgaggtcgcccctgcaggtaaccctctatttaagactccagtaactactctcatgtaagtaacccaggtagatcccttaggtagaggtcccccatcaccttccaggtaactcccaaggtaaggacccaggataacaccccctctaggtaaaggttccaaggcatgccccaagagcacctcctcctcacccttctggggacattcctgtagcaaccagaggaccggacacatacagtccgcctggcaatgggcaatggactacgggctgatgtgtgggagaccttccagcagcgcttcggtcctattcggatctgggaagtctacggctccacagaaggcaacatgggcttagtcaactatgtggggcgctgcggggccctgggcaagatgagctgcctcctccgagtgagtgtgcgggtacctggtgtgcagctgccctgaggctgagcccacaggacctatgtcaacactccaccctccaccccagatgctgtccccctttgagctggtgcagttcgacatggaggcggcggagcctgtgagggacaatcagggcttctgcatccctgtagggctaggtatgggggttgaggagcctttcctgggtggcaggggtggcgaccctcagtcttctgcttggctggaacgagctgctcaaaagcttgacgttggtgctcactagaggggtctgcagccttcatctggaccctgagccagtggcctgccttaccaccatctggggcctccgcctcagcttctcggctctgtccagctcccctgccttgatctcttgctctgatttactgggtctctgggtgtccatctgatttgttctcttgagctttctgtggaagacggcattccagccattggtcccttgtcctgtaccttctgttagtgtcttctcccagggccttgcaaggtcctggtcatatctattctcactgccatttgtctgtccgtcttccatcccttgttatccttttcctgtttctcatgggctccccataccgccttctctatacttctctctcattttctgtgtcgcttgtcgcagtctctcaaggtctctgaatgtctctctcatctctggatctccctgtctgtgtctttgggtctgtccttggcagggtgctgggtgatgaagagtccaccgttgttgaaaacctccagcagggggcttggctggtgggctccaggggttcttgttcctgctcctaccccaggggagccggggctgctgctgaccaaggtggtaagccagcaacccttcgtgggctaccgcggcccccgagagctgtcggaacggaagctggtgcgcaacgtgcggcaatcgggcgacgtttactacaacaccggggacgtactggccatggaccgcgaaggcttcctctacttccgcgaccgcctcggggacaccttccggtccgaggcagggtttctcggggcggggctggcgcggggccacggacgctttcagatcctagagggagtcaggctgaagaggcgggactttcctgtcgtaagagggcggaacttggagtcaggacttctcacgcgaaggcggggcttctcgattttcgagggggcggggctgactgggcctcctgatccccaaaaggggcggggcgggggcaagaggcggggcctctccttcccgggggcgtggtcacaagcgccggctccctccttgcagatggaagggcgagaacgtgtccacgcacgaggtggagggcgtgttgtcgcaggtggacttcttgcaacaggttaacgtgtatggcgtgtgcgtgccaggtgcggagggttctcattttaaacttccaacagctttgtgggtggaggggtcgttattctgattttacaggtggggaagtg

SEQ ID NO: 12783 - DNA, 2544 bp, Homo sapiens
cgttttacattcccaccagtgatggccgagagttcctgttgctccatgtcctcaccagcatttgctggtgctgtcaacattttggatttgggccattctaaagagtatgaagtggtcattttatcttttatctttttttctgtttctctctgtgtgtgtgtgtgtgtttaatttaaacttaatagcattgaccaatgtgttgtatgcatttacactatagcatgttatatttttgttctgatcatattccttttcacttttccattctttttcttttttctttctttcttttttttttttttttttggaaacggagtctcgctctgttgcccaggctgtacagtggtgcagtctcggctcactgcaacctctgcctcctaggttcaagcaattctcctgcctcagcctcccgaatagctgggactacagtgtgcagcacctcaccccgctaattttgtatttttagtagagacggggtttcaccatgttgtggcctcttccctccttccaagtccaggcagatgctccctctttcccgaactcatcccctacaccccatcacagggacttcctcccgccttgggggtctcagcccattttgtcctgatgacccacatggtgggtcatggttcctgcctgagcctgtgtcccctgtggcccacgagggtggacacggccttctccagttctgaatccctcgttgtccacctgcgcccttgccacggcctctcccgtgggctctcaccatgtgctgggttaaatggggttgaatatagaccatctaaggggctgaagctgctgcttctgtgtgtttggggtgggattaggatgggctcgggcttcctaagtagtgactgtgactccactgggtgacctggctcctgctgcctctcatagcagagcgggggtccccttcttccttgctgggcacagggcacacctctgggtgggagacaggggcctttttcaccagctcccacctgccctctgagaaaagttatgaacacgagcaaaatggaagcactgacatttggcagcagcttcctccccaggcgtctgagccgccagaggcaaacagggagggcgcggggctgggtcgggagagggtgagtaagctagtggccggaggccgtgctcaaccccagatcgggcttttccggtcgagtttcaggcacagtcatgagatttcagattgtgagtgggaacttcaggaccccctgacttcaacggcagaagcggtctcctgcttcacccacaccctcaagtctggtctgccccttaccggccataggtcctgctctcccgtggcctagaagcctcacctgcctcctgcctcctccccaggccaggcaggttgtgatgatgagggattgagaggctcacagctggggatttccctgcccatcaggcgccagctgcggccgcgtcagcagagacttcctgctctgtcccagctgtgtcttgtccacatctcgccccggggagcaggtgtgcagttcctgagtgacgcgagacacacacggccatcctgactcactccacccacttcacagctgcagcctgggccaggagagagggcaccgattccttctatgacgccctggccttggagaagggcaacctgggcagttgctgggagaatacattgagatgacaaaagcaatcatagctaagagctgacattgtttattgagttcttgccgtgccctgggccttgttctggccctttctacttgtacttgttgaagccccacgataaccttgcaaagtgggtttatgaagcacgtttcacagatgaggagactgaggctcggagaaatgacctgctaaggtcattcagccaggaaggggtgaggctgacactaagggccatgatgcgtgactgctggtggacagcattaaatggggacttccgtccccgagagacctgatcccaggaaccgacttttgagaacaagtgccgagtcttggggctggccaccctgaggtcaaccaggctaggcctgggctgcggtcttccctcccaggggacagagcagagcgcttgactcttcactaggccctcccacctctgtgatctctttggctcttcacggctcccttggaaagtagatgttatcattcccatttcctagttggaaaaataggcctgagatgggcagtccctgcccagcatggaatgccagagagggaggagttggacccacaacttcgatcttggcacctgcggcctcccctgccttttctccggtggggatgaggctgctgtgtgggtgtgggggtgactcacacgggccacgtgggtgggcgggtgctgcagctgtggctggtgggcgtggcctgcctggcgccgagggcaggtggctcagccagttctgcctctgacgcctcattccagccatccctctgcctgcaatgagagcttcccgccgcctcagccacagtcccacccgggggccttgggccccagacatgcggtgatctcagggcaagggttgccacgaccacccagaacctcaccaggtgagtcttctgtgcacaagg

SEQ ID NO: 12784 - DNA, 2538 bp, Homo sapiens
cctctttgcgtccagtgtactttaatttgctgttggctgcttcccaaaatgaccatatttctactgcccccccattaaaaagaagaaacatcacaaaattatttcttcaacatgttcattttatacatcagaatgaaaggaggttacaggtctcccatagattagggctatttaccatatctccttacttattagagtcacaaatcttagcaggaagccagttatgcagattgaaacatgaacttcttagtctagcattttaatactttttaatggtgaaatttatctagacttatctataaagtcttttgcaatttgtggtatgctgagtaagaactacagaagaacaaaaataaaagatttttttaatggcaacttaaaaaattatcaccacttgtactacttacaaattttcctccaaaaagttactttgactcatagtcaatttttaatcttggaacaacttcttgctatcacaaatacttcaagtgcctaaaacatcttccttaccagccaatatctcccgctccactctaagaaatgcaaactcgttcaagtttaacctgaatgcaacataatttggaatctttcattaaaatatatatcacacattttgaagccaaacatattttaaaatacctgtttttggtgatttggggtacatatgcttatcagtataacatattttaaaagatttttttctacatactcaaatctgtgttccattcattttttcactcccacacctttttgtctatccgataattcaggaatctttacagaaacatcttgtttccattgaaataaacaacaagagtaggaaaaagagtgaagcgaaatggttctaaattctatgcaccaacaggcattaaacatgcataaacttttaaagagatgccaagactcactaaaaaggagaaaaaaaatacaacgaaggtttctgagtagtttttagttactcaatttaaaaactttatcttgtaagcaaactttaacatcatccagagcatcgcacttatatatgaaagaaaaagttctttatcacaccttcagaaattacaactacaaattcctaatcccttatttaaaatctttttggctagatatgtttcaaaattcagaacttttcttagaatagtacgtctgccatatattatgaaacacttccagcaagctgtactgtaatcaaacacaatatttctgtagaaaacttatgaatatttacacaaagggaacattcagttacacatagcctcacttcccttcaggtcaaactttactgctaaaggagttagaaacgacagacaaaggaatggggcctgtcatgacatgttaatttgaaatctaaatctttatctttgataactagttcagagtcagtgtaaacatttggtctttccttccacaaaaaaatgaaacagtgtatttaaaattaaaaatgaaacagtatattttatttcagaaggtaaaagcaaaatgaattaatctgtgaaactaagtcaatcacattatgatcttctagaacttgggtagctccactctggttaaagattccatttcttggcacaacagtaaaagacatcagataggcccgggggtaagcatccctggggtattcaaataacttgggtagcaatgaagagctgcagaagagcaaggagacccgagatgatgtagtgtgctgcggcatacctgagttgggcaaactcagcctccgaagattaaaggaaagagcccaagtaggaatctgtgtgatcactgttcttttgccaagacacggggtggacaataagattcctttacaaagcactggtgtaagtgttcgcctggtgctgcaaaaagcggctcactgggaatggggaggagcgtgtggtaagccagacctgcggcgagaagttgggtgaaaatgggtcttaaccatcgcttcctgcatctatcccagagggttgggtaccttcgtgggcggagcgcggcctgcccagagtgccttctagatcctgggtcaggcgccaagctccccagcatcatgcaggaagctgcagccccgcagagttaggacagctcatttggcacccggcgagcccttcccaggcccgcagcccagaatagagccggggcccaagacgcccactggagacagggtcgggtcccactaccgcgcaggcccggctcgcccccgacgtcaggcacggggcgggacccttgcagctgtccgtccagtcccgttccccggaaagtgaggggcgggaccctcgcggctttctatccaatcctgttccccggcgaatgcggggcgggaccctagcggccttcagtccaattcccgcacctttgaggcccaagggggagcgagccggtgctgctgcaggctgaggctgcggcagaggcggcgaggcgcgggcggtgaggacggacaggtccgttgaagcagcattccctccctcccctaatccttcaactcgggggcgggggaaagttaagtcgtgcagaaccgcaaaggtgcctggatttggtgggggagtagtgtcatcaagcatc

SEQ ID NO: 12785 - DNA, 2537 bp, Homo sapiens
tgtatatggaaatgccaaggacctacatagccaaaacaattttgaagaagaataaagatgcaggaggagtcacactacttgattccaggatttactgaaaaatgatcgtaatgaagacagtgtgacacaggtgtgtggagggttccctcgagggacagaactaacaggagaaatatatatataaaggggtttattgagtattaactccacgatcacaagtccccacgataggttgcccgcaagctgaggagcaaggagagccggtcccgagtctcagaacggaagaacctggagtcccatgtttgagggcaggaggcgtccagcacagaagaaagatgcgggctgggagggtaggcccgtctcccctcttctcctttttctgcctgctttatattctctggcggctgatgagatggtgcccaccagattaagcttgggtccgccttccccagccccctgacccaaacaggaatctcctctggcaacaccctcacagacacacccaggatcagtactttgcatccttcaacccaatcaagctgacactcagtattaaccatcacaaggcgtgaggacagatagctgcatccgcaaaatagagaaccaagaaatagtcccacaccaaagtcaggatcaaatgattcctggacaagccaccaagtcaattcaactgagagaaagaagcctttgcaccagttggtgctggaagttctggatatgcacctggataagtgaacccccctccgtcaccacacacaaacgttaatttgagatggattgcaaacataaaagctaaaaccattaacacttcttgaaggtaacatagaatattttgtaatgttatgataggcaaaagtctcttaggacacacaaaaaaattaaccataaaagaagaaaatggctgggtgcagtggctcacacctttaacaccagcatgttaggaggctgaggcaggagcgtcccttgagctcaggagttcaagcccagactgggcaacatagtgagaccctgaaagaaaaagaaacaaacacatacattggacttcctcaaaattaaagtcttctgttcttcaaaagacaccaccgagaaaatgacaaggcacagatcaggagaaaatattcacaatgccattatgcctgacaaggaacctgtatctggaatacataaagaattcataaagttcaataataaagataatttgattttttaaagagggaaaggattttagcaggcacttcacaaaaggaaacatgcaaatggctctcacggcacttgaaaaatccctcagatgcactggctattagggaaatgctgagcgtatctacattgagacaattcctccccccaagaacagctgaaattaaactgagatacttcctcctcacaagaacggcagtgcagaagtcaccaccacacagcagagacgggcgtcctgtgggcagtgcagagttcaccaccacgcagcagagacgggcgtcctgtgggcagtgcagaggtcaccaccacgcagcagagacaggcgtccccacgggcagtgcagaggtcaccaccatgcagcagagacaggcatcctgtgggcggtgcagaggtcaccaccacgcagcagagacaggtgtcctgtgggcggtgcagaggtcaccaccacgcagcagagacaggcgtcctgtgggcagtgcagaggtcaccaccacgcagcagagacaggcgtcctcacaggcagtgcagaggtcaccaccacgcagcagagacaggcgtccccacgggcagtgcagaggtcaccaccacacagcagagacaggcgtcctgtgggcggtgcagaggtcaccaccacgcagcagagacaggcgtcctgtgggcgatgcagaggtcaccccacgcagcagagacaggcgtcctgtgggcgatgcagaggtcaccaccacgcagcagagacggccgtccccacaggcagtgcagaggtcaccaccacgcagcagagacaggcgtccccacgggcagtgcagaggtcaccaccacacagcagagacaggcgtcctgtgggcggtgcagaggtcaccaccacgcagcagagacaggcgtcctgtgggcgatgcagaggtcaccccacgcagcagagacaggcgtcctgtgggcgatgcagaggtcaccaccacacagcagagacgggcgtccccacaggcagtgcagaggtcaccaccacgcagcagagacaggcgtccccacgggcagtgcaaaggtcaccaccacacagcagagataggcgtcctgtgggcgatgcagaggtcaccaccacgcagcagagacaggcgtcctgtgggcggtgcagaggtcaccaccacgcagcagagacgggcgtccccacaggcagtgcagaggtcaccaccacgcagcagagacaggcgtcctgtgggcgatgcagaggtcaccccacgcagcagagacaggcgtcctgtgggcgatgcagaggtcaccaccacgcagcagagacaggcgtccccacaggcagtgcagaggtcaccaccacacatcagagacag

SEQ ID NO: 12786 - DNA, 2522 bp, Homo sapiens
ggggtaataataaggcatcagcctggatgggatagaaaattcttatggcagaggaagtgaaactaaagcccacttgcagcagacattagaagtcttccagaacagtctaagggtggggttatggctccctgggcctgcatgactcccctaaaacactcaccctcactccttttcccagtcccgccttgactccatatgtttcatcaaacatatcttggatttattatctataatcttgttaattgtctggcttgagatttagaatttggtcatctctgtgttctctacaagctcatgcttgagcatgcatttcctgtttcagattacaggactgcattttaatttcttgatagaatgcctgatatagccttacctggcacagccttacctgcagaaagttgtgtgcacaatgacttttgatgatgcctccatgatccttcactttgcatgtacagacacagacacggagatgcaaactcctgcatcctacaagggtcatctgcaaattggcttatcagttttctcactcctctgtctcctctgcggtaccagccctttatatgccaggcactgagaagcaacctaattacaggcgaggagacagggagggagcaggccataggctctgtccctcaagatgtacccacatagaagaaactccaggtctgtctgggttttctggattaaacccagattcaggtattggaattacaattcagtttgaagataatttaacatatccctcacccatctccctcccagaacctcccagcagcagcaaaggtgagcttgacttttttttttttttttttttttgagacggagtctcacccctgtcacctaggctggagtgccgtggcacaatctcagctcactgcaacctccacctcccgggttcaagcgattctcttgcctcaggctcccgagtagctgggactacatgtgcatgccaccatgccaggctaattttgtatttttagtagagatggggtttcaccgtgttagccaggatggtctcgatctcttgacctagcgatccgcaggcctcagcctcccaaagtgctgggattaagcgtgagccaccgctcccggccgagcttgactcttttttttttttttttttgagccggagtcttgctctagagtgcaatggcacgatctcgactcaccgcaacttctgcctcctgggttcaagcgattctcctgtctcagcctcccgagtagctaggattacaggcaggcgccaccatgcctggctaattttgtatttttagtaaagacgtggtttctccatgttggtcaagctggtctccaactcccgacctcacgtgatccgcccccctcggcctcccaaagtgctgggattacaggcgtgagccaccgcgcctggccgagcttgactctttagagcatttccttcccttcctgtcctgggccagagctagggctggagccaaaacaagcccagccctggctcctgtgcctaaatttgtagatttcaccaccaccacgcctgtcctcacacctgcttccattccagggaccttaacaacttctagaatccatcaggagggcagcagtgagggagctgggaacggtgatgtggaaatcgccctgggtttgggagtgggaatgccccagccctaggcccctctgtgccacccatggctacatatcctaggtcatgttgctcctccagagcttgtgtggcctcttcctatccttcagggcaggacttatgtcgtccgctggggaggccctcccccatctaagttggccctctctgtgctccatatcattgccccctccttgacttcctttcgcaatttatcacgcgcatatgtatgtgtatgcataaacagatataattttgtttgctcgcttatttggttcgtcgcctcactagattccggactgtgggctccaggaatgcagacagtgtgcctttgacccttgcatcctcctcagagcctggcagagtgccaagtacataggaggagctagaaaagtaattcggcgaatgaataaatccatgaatggcagctgaccccgatgatctctcaggtttctgccagttgagaaagtgtagcagtgccctggacggggaggcgggcggggcgaactgcgagctcctgccccttcccagggctcaggcgactgtggaccccgatcagcgcaggctcgcggcccgctgtggccccgcctcctggccgccagccgggcggagccaggccgccccccaagccgggtggccttcggggtgcttgcccggctggaggtggtgagggggcgggtccaaaggagaggtcaatgggcggggcggggccacaacgcccccacgtccagagccggcaggcaggttccccgcggggggccggggccgggccgttgcctagcaacgccgagccccgcccggccggcgcgtgcctgcccccagcatggcttggcagggctggcccgcggcgtggcagtgggtcgccggctgctggctcctcctcgtccttgtcctcgtcctacttgtg

SEQ ID NO: 12787 - DNA, 2519 bp, Homo sapiens
taataaggtgcaggggagcagtaaaccgagacaagtccacttaatgaacgggtgtccttatttttattgtttgaaatgatatccaaagggattgcagataattagtttgtgttcttatgaatgataggctaaggagattcaaaacactgcttgggccctgcctggttggttccagagagaaggttttcagtggtttctgcttccctggctttattctgaaggtccttctcttccattcagttcttactgcaatcggaggggacatagctgatggctctgtagttccatttgagagcacttaaagatattctccaaagaaacactctctgacattctgtgcacagatgtagagcagctcggggctgagctgtggctgtgggccaggcagtctgagttggagagacaaacaaattagacaccagtcgcctctcagcccagcttttctcccttcagtaacacctgtggagtttatgagttcctctagggaaaatcggagaaatctacatgagaatgatgtcttgtttcctgctgggaggaccgtcaaagagtttataggagaccatcctgcagtctcaatgcgtttattgccgtgtcatatattgggggctgactattgccacattactggagcaccccattcccatccttcctcagctgttgaaagtgagacaggttgaggacgcagtccggagagtgttgcttttttcaagtcttgttttctcaaactttggactcaccagaagtaagtcaccatgcttctgtgttggctggggaattcttccagttagaatttagttgtagggaagttagaagaggagggagcatgggtcagtgatgtctggaatttggggtgttctagtgagatttggggtggggtcatgtccctgtggctggccagggtagtggccctgaagggccaggttggcagggcttctaggagaaggccatctcccagaaggagatggaaccccaggtgggagggtatgtggtgtgttttggatgtgattcagaatggaggcagtgaggcagaaagggaagggaaagggaggccgggcaggaagccagggttggggttttgctcttatagacttgactccagaccatggcccttccttctctgccatggatccttctggaggagagggtatcacaccgcttgaggctctgtgcacaggcgggttctgtgggcatccgcgagtgagtggatggcaagtgagaggggggccatggggatcggaacacttggcatcgtgacctctcagctctctcttcagacccccatgcactactcttctctatgacagtgagaccaccactgcctccgactctttccaaagcccgaggtcagctaggctcctcgtgctactcaccctgcacagaggcagtctttagtcctctttgagtcttggtctattgcagtatcctcctagaagccttccttaggaagccgcaggaatctcaaacacagcctcatcagccctgcctaactcctttggtggcttgacgtggttaatttcaaacaccttagcagggcttaggctgaacgggcccctcgttgccctcctaccccctgtccctgcatacacctcatgctggaaggacctgtgttgcccaggcacacaataggtgtctcgcccttgggtcaagccgatgccttgtatacgttctgcctggaaagccccttcttttcagacagcaaacctgtactcaactttgatgactgagccttccatgaggcccgccaagactgacctgatagaattttccattcccttctctgtttccctccaggccttcttgcccccatctcttctattttgcattacactgctgacctgcacttcctgtgtctcggtgaggttcttcagggcaggaactgtgtctagttcagtttcacccttagcaacaagtggtaatgaaatatttctgccaaggatccaattcagattatgtaagcatttacctttgtttaaggcaaaatcctgattctggaagaggaaagttctttgcttctcacagggcaggcatagaacaggccagaagctgtccatgtgtggcttgggagagacctggctatctgtacttgagccctgagaccccgaaggcccccggctgcatctgctcttggagcttggggtggcctgggtggtggtcgagtaggatctgcagcgtgggatcatcggcagagtcaatgccattcccttgcagatccactctcccgtaagaaactgttctgggctctgagaggaacgaggggaagaggggagatgggtgagcttccttgctgcatttagcaactcagtccctgggggaggtgtagacactgacacactccctgtggccccagggagaacaaacccagagcccagtgagggtgcagtatgagcaaagtgctggggcggggggagggcagaagagggagcagttgattttggcttaagagtaaactgaagagagaacagacacggggcggctgagcagcagtgtgttcatggagaaagaatcaaagcgcacatctt

SEQ ID NO: 12788 - DNA, 2509 bp, Homo sapiens
aagacgttacaaaggaaatgccatctacgataccattgctttgggcttacagctgggcaaattatatgcacagaaagtttcctggattgggctgggcatgttgactcacgcctgtaatcccagcactttgggaggccgaggtgggcggatcatgaggtcaggagattgagaccatcctggctaacacggtgaaaccctgtctctactaaaaatacaaaaaattagccggaagtggtagcgggcgcctgtagtcccagctactcgggagactgaggcaggagaatcatgcgaacccgggaggtggagcttgcagtgagccgagatcgcaccactgcactccagcctgggcgacagagtgatactccgtctcaaaaaaaaaaaaaaaaaaaaaaaaaaaaaaagaaagttttcgttttctggattgtaatcaacaagggccaggaagggtggagtctttgcggggtgagaggatgcgtgtggacagtgataacagcagctagcctacgtatgacacccactgaaaaccagcgctatacactcagctctacccttctaacttgttgaattcttacaacaccccctaaggcaggaatattattattcccattttactgaggcacagatagtttaggtgacttgcccaaggccacacagctggtaggaatttgagggtttttgttgttgttgtttgtttgtttgttttttatgatgcagtctcgctgttgtcgcccaggctggagtgcagtggcatgatcttggctcactgcaacctctgcctcccgggttccagcgattctcttgcctcagtctcccgagtagctggaattacaggagcccacaaccatgcctggctgatttttgtatttttagtagagaccaggtttcaccatgttgctcaggctggtcttgaactcctggcctcaagtgatccgcccacctcggcctcccaaagtgctgggattacaggtgtgagccactgtgcccggctagggggggttcagtttttaaatgctgtactctttctttctttctttccttccttccttccttccttccttccttccttccttccttccttccttccttcctttctttctttctttctttctttttctttctttcttgggacagggtctcactctgttgctcaggctggagtgcagtggcgcgatcatggctaactgcagcctcaaactcctgggctcatgtgatcttccaccccagtcttagaaaaggttgggattgcaggcacgaaccactatgcctggctaatttttaaattttttgtagagacagagggtctcactgtgttgcctaggctggtcttgaactcttggcctcaagcgatccttcctcctcaactcagcctcccaatgtactgggattacaggtgtgagccactgcacctggctaaattctgcacaccttttactctagggataaaaataatacgaaagtggaatgccagactccgaatacacacaccaagtggcctggactcttcactgctacctggcatgggggaggggagtgccccaacttcctctctgtccttcctgttgcctcaacaccagctggagtgctgagcagtgccagccaacccataatagtcagcagagagcctcagggccaggtcactctgacattgtgggggtgggggggtggggactcctgcctgggtcctgtgctacccacagctttgtctaccggagcctgtgtgccacgtgctggacaaatcttaactcctcaaggactcccaaaaccagaggtaggttcacctcaatgactcttgtttccccgatgaggaaataggcacagccagctgcaactgacacccacagtcatggaggccggggctgctcaggaccacttgctgtgctgcctgccagctctccagagcccaagatttggagatggtaatattctagggcatggggttctgcagcggggactaacacactttgaaatttacctacttagggctgggcgcggtggctcatgcctgcaatcccagcactttgggaggctgaggtgggcggatcacaaggtcaggagttcgagaccagcctggccaatatgatgaaaccccgtatctactaaaaatacacaaattagttgggcatggtggcgggtgcctgtagtcccagctactcaggaggctgaggcgggagaattgcttgaaccctggaggcggaggttgcagtgagccgagattgcgtcactgcactccagcctggatgacagagcgagactctgtctcaaaaaaaaaaattttacctacttagctgagtgatcttaggtaaattacttaacttctctgtgccttatctgtagaataaatataacaatagtgtcaaattcagacagttattataaggtttcagtgaggtcaggcacggtggctcatgcctgtaatcctagcactttgggaggccgtggcaggcagaccacttgaggtcaggaattccaaaccagcctgaccaacatggtgaaaccccgtctctactaa

SEQ ID NO: 12789 - DNA, 2498 bp, Homo sapiens
tcctaacgtaactccacaaagccatagtataacgttataatagtaaatagcataaccttataataaatagtttcgccttattgaggtaggtagtaagtgtgctttaggtagatttggttggtgcaaatgtaattgtggtttttgccaccgaaagaaatggcaaaaccccaatgacttttgcaccaacctaaatatcatctcatttacatatgtaataaatactcaatatttgctttaattaaaataggggtagacaagtgaattatatttagaggttctaggtgactgaaattttcacaggggcagaaacccaaaatatgtatgtgcagttaattttttctgtctcttctgtgttgggccatcttttttttctctttttttttgagatggagtctcactctatcgcccaggctgtagtgcagtggcgtgatctcagctcactgcagcctccgcctcccgggttcaagcaattctcctgcctcagcctcccgagtagctgggactacaggcaactgccaccatgctcagctagttttttaatatttttagtagagatggggtttcaccatgttggccaggctggtctggaactcctgacctcaagtgatccgcccacctcggcctcccaaagcgctgagattacaggcctgagccactgcgcccggcctttctcttctttttcatgatatactactggatttgtctgtgcttgtaattattttagctgtttattagtttattacaaaaaaatggtactgtacctttatgggaataattagcacctatgtgaatatttaagttaccgattttggcaaatgtgaagtccaagttgtcttgttttgtttacgtttatatcctctctcccttcttgagaagacatattttcatttaaaataaacccacttggccgggcgcggtggctcacgcctgtaatcccagcactttggaaggccgaggcgggtggatcacgaggtcaggagatcgagactattagccgggcgcggtggcgggcgcctgtagtcccagctaccccagggaggctgaggcaggagaatggcgtgaacccgggaggcggagcttgcagtgagccgagatcgcgccactgcactccagcctgggcgacagagagagattccgtctctaaatacatacatacatacatacatacatacataataaataaaataaaataaacccactcacccccaccccgactccccagctgtagcagggaaggattaagaaggcggggtggggggtgggggaagccctgttaggtagtgctgcgttgggcccacttctgagggtttaatcctagtagggtctttggagttctttcttcggaggcgcgtagctctgcattatttaaaactgtttcccgcaaacccgcaatcccttaggccaaaggcacccctaacgcggaaagtctacgaacggaaatgtccggagttagagagcggcctttcgggcagctgccccgacttctccaaggccggagggccggctgggagcgctgcaagccagagagggcgatcccagcgggacccgcggcctgaggataggcctggagctgccgcctccgccaggcgacgggaaaccctcggaagtgggtttccgcgcgaaagtagcattgcggccaggcgggaaacgtgttcgcgaagcaggagggcccccggggcctttcccgggcgacccgacccgccaggccgcgtggcgggagctttcctgttgagcgcggtggagcgcacacatttccttcagttctttctcggaagtttaggccgcacccacccgcgccccctttccaggattatacaagtgcacgccagggtttcttatttttggtgtgtttttgagaccaaagaaccatatccgctaagcctgaggaggcacccgccccctcagctctgaaacgaggcctcaaaacggcaaccgatgtggtagccgcgcaatcttccgaaacccaaaggctagagggcgtgcccagtggccaggtgcaggcggtggggcaagtaacggcttttggtagccccgcccctccgacccgccctctccgcgcctgcccattttcgttccctcgggtctgtaaccctctcccgggccgcttcctctttaaggcggagcccggcgtggatctcgcgagatccggcttggcgccgtgacctccatgtgggagctccagctctataagtaaacactctgcgcggcgcagacatggcctcttcctatctttgaggcggtgtctgcggcagcgcctcagagtggttccggtcgtctctcctcaagtcggctagtcgggcgcgcgcgctgagagtcgtcgccgcctgtcgggcccggcgtccggtcggtccggtgggcgcgctcgcccgcctgccgctgagggcccgagccgcagggaaagcggcgcgggccgggcggggcgcggcgcccagagctcagggggagacaaaggggaccggttcctctctaggcgccaagatgtggatacaggttcgcac

SEQ ID NO: 12790 - DNA, 2495 bp, Homo sapiens
gaagcaagtgaagtctgagaggggggaattctccagggggggattggaggattgtaaatcttcaagggcctccagaggtcatcttgatcaccccttctccagcaagagctgcacacacccagctggagggaggaaggatattttgggtggacggagtctgaggctgacaactagactgttagtaagttcttcccaggcccatccctgctgggtggctcagaggatggactctggagccagagggtctgggtttgaatcccagctctgccccttccttgctctataacttgggtgaaataatttaacctttctattcctctgtttccatgcttgtaaagtgggaataaaatgatatcttgatgtttggggcaaggactttcaaactccagagtattcattaagcacctaatgtgtgtcagacactgtgttaggcatttaacacaggttgggtcatttggaaggactcagccggagaccgtgagaccatttatatgtgccagtgtcttcatgttgggagcacttattccactgtcttcttcctaggactgattttcgggcctcaagggtaactgtaggaggtccttccctggttactcctgctgcgcctgcccctcctaaccatggctggactgtccctgtcccaggctaagccagctgcagttggctgtgattaatggcctctattaacagcaagttgtaaactgataaagtacacagtgcccatgaaaatctcacctctgctaaattccacaccagtgagtacttactccttaacccccgaaacctcctgccttgcctcgtttgagagacatagtgacagagagtacacctttaaccagaggaattcaaaatgccttggaagcaggaaacaactccatgaattctttgggggaaaagcccaaatcctaaaacctggtttcacatggagtggagcctaggcgagatgaaattaaagtccaggtcaaggaaggtagtttcaatcagcctcaaagaaatcccagagccaactggccaacagctgcgtgcccttgggtaagtcactttctcctatctgggcctcggtttcattatttgttaaatgagaggtttggttcaaaatgattcctagtctcctactctactcggcagacttaagagcggttctgaatacaggaatctttaccaaaaaaaaaaaaaaaaaaaaaaaaaaaatcacactccaggccttagttccattccttctttccctgagagaatctttgcaaagcagcagccctcttccacctggtcatcccctgcctctctacactcatccagccaagtaattagcttggtttccttcaagtcaattatcaccattaaaaaaacaaacaaacaaacaaaaaacaatgaaattggcattccttggtgagtaaacgtgcaggccagacagggatgtgagatccacaattcaaagaaacccttgcacactcctgacgtgttctttccgaacactcttcggagtctcagttttatcctcaaaaggcagagaggcgcaggttttagcttaacccactgcgcaggtgagaaaactgaggtccagggtgacgtcatgatctagggcgagcggcaggtgggagattagaacccgagaggctgccgcggcctctgctccctccctgctaggctctgtcccacaatgcacccgagagcaggagctgaaagcctctaacacccacagatccctctatgactgcaatgtgaggtacgtaatctctctcgtgtgaagtgtttatgtgtaaaaacagcggattagtgtctccgtgctgctatgtcttctgggatcagaaggacccagcctcctgcccctccctgggacgcggagcggtgacctccaggcgcggtaaatcgccgcggcgcctgggacccagcggccagtgcacccccgcggtgggtcccagcgggctttccacgaccttcgcctcacgcttttagcccgccgtccggcagggggcctgggaagtcctcccagccaggatccatttcaaactctcccacctccacctgccgcaccgccccccgcaatccttccaggctcggctcccgggtggggaaggacggagcgagcgggcggctggctggaggcccgagtctcggggattggttacatttctccccgggttaattaccacggggagggaatctgagctgtgcctgtctcgggcacaacaagccttgtcgcctggtgagagaatctcaatcttactcaggtaacacctgctggcccggcacagaaatgttctcattctgcgggacgccacctcccacagaggactgcaaacgccccaggcggcctggacccggagtggagcctcccggggtggagactggacggggtggtgacgggattggacggctggagtgtgcggtcactagggggtggggctagggcgggccacgtttggactgcgaggcccgggcctgaaaggaatccctctttggccggcgccaccctgttcaaccctgatgcaatacac

SEQ ID NO: 12791 - DNA, 2495 bp, Homo sapiens
gttccaggctctcaacctgattgtgcacccaagcggcccgaggctccgtgcagattccgggccccacagacaaccgcttcctccaggaagcctaccgtcaagcccccctccagggctcctgtgtcaggagctggctccagggagagtgcgaccctcagggctggtcacagggatcagatgagactccgccgagcctggagctggaagctgcagcggtggcctagcaggcatcgccatccgtctggcccggccgcagtgagggaaggtgcaccccagattcctggctttgccaaaactgtgcctggcgggcaccacgcatcctcagggaggcgccgcagctctgggggggggcacccacagccctctctgccaaggggaggagggaaggtgggcagagtcggccctgggggccctgcaggccgcggggtaccggcgttcccatcatagctccagccgcacggaagccccttcactgagtcctcttgtgagcccttcggcctgactgggctgcagaggccctccaggctggcttccccctcatgccgcccagcctggcccctgcagggccccaggtgggcctggggtggacctgggtgcagggcgggacccagcccatgccaggcacatacctccaggcccgctctgcgccgcacaaacttgtctcccaggatttttccacacgaaacctgtctcccagggaatcagccagtccgatgagctgggcgttcccaccccgccctccgaggcccccacagtcctgtccccgccgcagaggctgccccgcacgcgccgggccagggatggagtcctggacacctcggccgtcagcagtggcctctgggatgagctgggaggctggcgggatccggaccacgagccgggtaggtctcccaccccttccccaccaccccgaccccacctggtggccccagcccgggcctcacccatcctttcagtggaccttcccctccccctttaaccccccacgctgacctccgactcctactctccagcttcctcccctcagaactgacctcacccttaatgctgcctcctaaccctgacccggccctcacgccagacccctgccccagccccattaaggcaaaaatcttccagggacggagctagggggcaagggtctgccctggaggagagcccagagccagggtccagggtccagggagaagcagaggctgtccgatgagctcgtgagagaagcccagaggttgtcatagatgttcagctcccacccccagccctcctaggcttatccccacccccatctaccaggggcttgtcccagaggctagagggcctcagagcccatttgctggctgtggtgctagaaggagaccttctgggcacaagccctgcttggtccagggcccccccaccaggggccccccactaccccacccccaccaggggccccccaccctcgctccctctccatccaggcctctgctcttccagacccctggttcttccctgcacacccgctcctgccccagcctgacatgcgctgacaggagtgcaggccctctgagtcaaccccctggggcggccccgcccccctgcaccctgactcatgtgctgggaacggcctcccaccccagggcctggggtgcaggagcagtggtgccagggtcccagaagccagagagggttttggaggcctctgtagggggtgagggggtcctgggggtgagttccagggtctgcaggcttcgggggagggccggtccatccacatgcttcctggtgcggagggggctcgctggattccaaggaccagggccagggcctccatggagtcccgttggaccctaaagctctgtccctccagcctttgtcctgatccctggcactgacccctgactcccgacagtgtctcctgccaacccttcctaggcctcatccccacctcaccaggaaggctgggctaccatggaggctggctgattcttggagctacctagggccctagacccccagggactggggcaccctccccttcatgctgggggtggcaggacataggccccccgcaggccccctgcccttccctgacactcaggacacagagggcccctctgtcccagccccacgacaaagggcccggtctggcctttacaggctgagaacaagaaggacccaggtccccgtggccctgttgtgggatgggagaaaaggaggcgggaggccaggctgggacctggggccatgcagggcctgttcttccgcccaaattccaccttaagcaggcggcggcccctccctcccacctggccaggtgtccccgcccccagctgcgctcagggctgggcaggcgtctgtcttcaggcggctctgggtgaggctggctgggcggggacttcagggagagggcctcgagggacaggacgtgaagatagttgggtttggaggcggccgccaggcccaggcccggtggacctgccgccatgcaggacggtaacttcctgctgtcggcc

SEQ ID NO: 12792 - DNA, 2495 bp, Homo sapiens
tgtttcaatctccatgtattggtgagaattaagagacttgcagttcgccatgtcctgtcatgttagcttattttgtagggaaatcaaatctggcacctttcaattaacttctttacctctctaatctaaaaacagatagaatacattctggagcaagaaggcatgattactatctgtggattgccttgacttcctcaactgtgtcttctgtcatttcgaaatttgctaaaagacctcctataaaagcaggaaagcacagacggaaggaaggtggtgctgttgaaaaataatttacccctagtcgtgagcttggcaactcttcaagggatcacaatggtgtatctcatctggacctagaggtctcgaaggaggagataagtggaaatgttttgtgggctggagcttagtcattctcctcggtgacttgaggtgcaagctattttggaggaagataaagaggaagggagacaagaagtgggaaagaaaaaagtctctctgccttcatacatgcttctgttcactacgtttatactacttttttttctttgaaaaattttttctttgaatttcttttttttctttgaatgattgttttaaatcatgtggtaatgtggtcatgacatatgttaggtaacaaaaagaaaaataatgattccaattttgttaagtatatgtatagaaaaaaggaaagtaagcaaatcgatcagttatctttgagtgataatataatgaataatctttatcaccttcatactgtgttctttatattttattctctaaaattttccattaagcatgaataaggttttgtatcagagttttaaaatacattttaaaaggaaatggcaacttattcagctacagcttttttataacatagtatatgaaagttcatatctagtaaatgtatttggaaatataatacatttggaataacttttctgtaaggatgcatctttttaagtgactttattagtctccatgttgcatttttaaatatataactctgcagggcttcacattttccccttcacttttgctagctgtcagtcatcacctctaccttgaaactagtctatgaccagtaggatttgtagataattatcattaactgattgagtggattcagcagtgtgcctgttgtaattaagtgtttggatatgcaaatagataaagaatagataaaagagaaggtactgattaggatgttaaattcacaatatgatggttgatagtgacaggtaatagcatgatgtccttttgaagatactatattaattatttcttgaataccttttcaagtaagttactgttatttgaaattccacttaatgccagccctggcccctcaacatttcatcccaatctcgttgtttttgaaaggctcagagtcatattgggcacttctttcattactgcctttaactgaccatttcctcttttctttcctgcaacagattgcagattgagcttaaccaagaagttcgtaggctaatcaaggctggcttgacctacaaaagaagaagagagttctgcctgcccacttgggcttgtgttgacacggctgataacttgccatcacctgttgccagtgtggaaaaattctccctgttgaattttttgcacatggaggacagcagcaaagagggcaacacaggctgataagaccagagacagcagggagattattttaccatacgccctcaggacgttccctctagctggagttctggacttcaacagaaccccatccagtcattttgattttgctgtttattttttttttctttttctttttcccaccacattgtattttatttccgtacttcagaaatgggcctacagaccacaaagtggcccagccatggggcttttttcctgaagtcttggcttatcatttccctggggctctactcacaggtgtccaaactcctggcctgccctagtgtgtgccgctgcgacaggaactttgtctactgtaatgagcgaagcttgacctcagtgcctcttgggatcccggagggcgtaactgtactctacctccacaacaaccaaattaataatgctggatttcctgcagaactgcacaatgtacagtcggtgcacacggtctacctgtatggcaaccaactggacgaattccccatgaaccttcccaagaatgtcagagttctccatttgcaggaaaacaatattcagaccatttcacgggctgctcttgcccagctcttgaagcttgaagagctgcacctggatgacaactccatatccacagtgggggtggaagacggggccttccgggaggctattagcctcaaattgttgtttttgtctaagaatcacctgagcagtgtgcctgttgggcttcctgtggacttgcaagagctgagagtggatgaaaatcgaattgctgtcatatccgacatggccttccagaatctcacgagcttggagcgtcttattgtggacgggaacctcctgaccaacaagggtat

SEQ ID NO: 12793 - DNA, 2484 bp, Homo sapiens
atagggcatgcatcagatcacttggagagcttattaaaatacagattgctaggctccaccctcagcattcctgattcagtgaggacaatttgaatttccaacaaattctcaggagatccagatgtttctagtccaaggatccagaggttctagacagaaggaagggaggtggtgcaatgggcctcttggtcttgttacatgacttcttatcttatagttgtatttggggattctagactagattttattaaataaaaagattatttttaaaaaagcttgaatactgctgttttgttgcctttgcttttgtttcatagaaatcaattgaaggtgaaaataaataaaaatgctaatactagtgatatggggagatatcatcagtttaaaacaaatgaaatactgaatttatttagtatatgaaaagagagccttattttcttcccttgggacactctttatgatgaaaaaacgtaaaggaaatacaatgtatgctggaaataaattactaaagactgtgtctaaatgaggaggtgcatttgggaattttattgtttttaggtttgcgggtgaacagaatcccactgcaatagtgcataagactctttccagctatctccagaagaaggagataactagcaaggttttcactgttagagtttgttcagagcggaacctaaaggaaatactgggaaggtcacagcagtttcatctcagcttattggattggatcaaagtaattctactgcaaggcaaggtatatcattccatttacagacagagaatgcatgaagtccttcatttcacacagtaggtgtgaagaaggtaccttggtaaatttcctatttgctttcagataaagtgtattcttaaacatgatgtgggtagctgcctgtttttgtgtcgcctctgcaagagacatcttggaataatagaaacaccagtgtctgaatagcctaaagtggagcttacttttctgttaggtgagtcacctttaaaaatgatattttttaaggataagcgatgaattttaggacgttcttccctctacttccaacgtccacaagaataaaccaccaaattcaacgttttacagaggccaagtgcttaggttttgtgtgtttgtttttaagagttttcttgcaaggaaactgggagggaactataaaagggctttaggcaaacagggtgggcgggtgcagggctttaagctgcagaaaggagaatctggaaagagcttttaggaagcagattctcacatgttttaatatgaaagagtggcacacgtggtgctggcattccatcttaccatcagtggaaggtttgaaccaacatcaaatttttctggagcaacttaggtaattattacttgaagaatatgcatttcaaaactaacacctttaagagacaatgtaattcacctgcgcttccccgccccccccgcccgcgccaaccccaccccccgccaaccccgcccccgactccgcgaacgccgaggggcccgtggtctgcctgagtgacctccatttgctctgtcatctcaggactagaagccatcagccagcgtacgccctcagaaaactctcttcccttctcgcgggtccgcctggctcccggaggcggcggtgccaggctgccggagttagccagcggcaggctgcgggcgcccgtccctccggttcaccctttcacccctccttcacccccggagcgccaggcgggtgccgcgggttttccgcccactcggaaggcagtgctggcgagaccaggaattgcagggcctctccgctttggcgagctctggaatccgagtcctccccaccccagccactctgctggggcgctaggggctcgaaaaagcctggggttggctgaaagacactcggattagagacgcagccagcctccagggaggtctgaacttgtcttcgacctccccgaacccctccgcctctgcgctgggagacgcccagcagccgggcgggcccgggacgtgtagagccagagcactccgcagcggaggcagcgcgcggcacggccgcccggggcatccccgcggctggggggcggaaggcgagggcggtggcaggaagggtccgccaggcctgagctcgctcccccactgccagccgccggctcggaggcccgagccgtgcggacggaaaggggcggagccgcgggctctggttggtgtgggctcgggggcggggcgcgcggggccgggccggaggcggggctagcgccgggcgctggagctgcgggcgcacggagaggagtcgccagcagctggagcggagttggaggaagcagcggcagcggcgagggcggcaggctagctgtcggagacggcaagcacggatcgggcacggccggcgggtcgcagccgggctggaggccggtcggaaccgagcgggcaggaggccaccgctgcagcgcgggccccgcagaggaaggaagccggcgggcggggtaggtaggcagcagcag

SEQ ID NO: 12794 - DNA, 2475 bp, Homo sapiens
ctttcccactttcagcttccagagtctggcatgttccccgggcctccccgctgctgaccgcctgtcctactcaggccgccctggaagccgacaggtgaggctccctgggggaggacaggctggaggaacagaagcacctcccgttcctgtgggttgccagtgccccgggactgcaggcggccaggcccacctgggcagccatggcctccttctcctggccacaggcatgctctgctcctgagccagggaggccatgcttctggtcgtgggccacctgtgctgtgcccaagacctgcccagcagtgcccagtagcccgtccatctcctgcacccctcccctcatccccctcccctcccatcctgctgacttcctccctgcccagtatgtttctcttgggctgtggctgaaatagtttcgctgctgttgttgggatgattccctttcgtctctggctgcatctctcgaacacattcctccccattccaagacccgggcctgcctgactcccacccacaccctcccttcctcctctgactcagcccagagatgccccagtgggactgcggttctgccttgagcgctcttggcttattctgtctcctcctccccctacccccgccagctcccctggactctctttcagccaggtcccagtggcccctggtgacagcctaacccccttcctgggtggtatttctcctcttcaacggtgggggatggtgagggagtgaggcagccaacagccctgggccgcagctgctggggacggcgtggggggcacgtccagcctttggggtgatggggatatggcccagctgctgagccctacctttgggttgattctgcattccagaaagcagagcctttgggggtggccagggagggcactagaacccagaggctctggaggaggaaggagcaggatctttctgggggccttccgaacagcggctgcctagtgacccgctgcgtgcccacccagaggccagcctggcactgtggccatagagatatattccatgggtccccttgttaaggaattgaagatgcagttgtagagataaggcaaacttgcaaaacaattttggagcaattaggcactaagcagtgtggtattaattacaaaagcaggaggcgttctgggaggggaggggaaggaaggctgtgtgaggagtattgctggacgttagaggtggtggtgagagggtttagggaaggatgagcaggaggcccgacatgctgggagatggagaaacactggtccgggcgacggctgatgtattggggctgggggattttttagggggaacctttgttctgagatgagccaggaatgagcttgtttcaagagggctggtcagtgtcagtcctggctctgttccgcgacacctctggtgggctgtggtctcagcaggacccacgtgctcaagggcaagccttcccgagcttccccatcgtgttgcccccagtccaggaaaatgaagggtgtgggaggtacagaggcatggctcccaaaccagcggcaacacctgagaacttgttggaaatgcaacttcccaggctccagcctacacccgctgaattgggcatggggcttgtgggtcacgagcccagagctgggtgtggggagactcacttgggtcggtcccacctctgcctgacgacttggaccagccccccttcctctccctgggcctcaggtcagactagacgctctgagttcccttctctgaccttgatgactctgctcattccttcggcaaatatttgtcgagcagctgcttcatgtcagacactcatctgggctctggggatgcaatcgtggaaaaacagagtgacacctctgaccctatggagctgacgttctagtctacaaatgaggctgtggtcccacgggtgcacaagtctcagggtcccacagctgccttttgagaatcactgtgtagctgggtgctgtgacatgtgcctggagccccagctactccggaggctggggcgggaggattgcttgagcccaggagtccagaccagtttgggcaacatagtgaaacccccatctctttaaaaaaaatcgcttatacttgagagtcttaaaggctctaagaggtcccatgagaaagaaacccacttaatttttctttatatcctaaacttgttgaacagcagaatttctcctgaatttctacccctgaccccctgccctgccctgccccacccccaggaacatccttgcgttccccagcacacatttcgagaggtgttggctacagacaagctcatgatgggcaggtgaagggggagcagctttcctggatttggagataaaaggtctcttctgtgaaggcaagggtcgctaacccctaaccgcctgggaggaaaggaaggagagaaagacattgtctctcccagtcggggagctggtctccttttctgggctgggcagtctggtgggagtgtgtgagaggaatgctgtg

SEQ ID NO: 12795 - DNA, 2471 bp, Homo sapiens
gtagagacggggtttcactgtgtaagccaaggctggtctcgatctcctgcctcatgatccacccgcctcggcctcacaaagtgctgggattacaggcatgagccaccgtgcctggccacattaccttatttatttatttatttatttatttatttttatgagttcaatagtttttggggacaaggtggtgtttggttacatggataagttctttagtggacacattacttcatttaatcatcccaggaaacctgtcctcggaggccccagcatgtcccacagcctccgtctctctcaatcctcccatttagagagctgaaaggactagcgaagcttacagaacataggtggcagagctggatattgaaccctcattctccagttctgacacaggtgcatgttttccttttaacaggagagaaaagtgaggagcagtgattaccgccacagaaatatcctttcatggcgtgtcctccggcatggtctactcagtgtggtggagccactgcaggtccctcctccagggatgtaggaatgccagtgaaggccttcctgagttgggagagaggcagaggagtgagtggaggcagggctgtagcttctgtgccccgcccctacccaggctctccagggaggcaggaaagaggctgtgtttagacctgagggagccagctgtgaggctggagcagttgctgcatggcggggcgggggctccacagggctgttcacctgctgctctgtgcagagacagcctcaagtccagctgctggggttgcatcacctgcagctaaaacagccacagggcccaggctgccaaaaggcaacagaagcaatctaagaaaccaggcaagggagcctcccccatctccctgttgccttttgggagcatagagcttccctctgaaggtaacaccctttgcatttttctctcttgactctgttcatcaacttccactcccaaatacttgtgcccttccttctccacagatatacacaatccctgggcactctccacctaggtcagctggctctagtaaggcagcagtcaagggagtttctgggctgggaccccctctggggtgcaggctggggtgccctgctggtatgtgccccaacaggtttttccctatcagccttgaaatcagcctgcagcctgtctgacctgccccccagggagctggagccagaggcagagccaggtcagaagctggggcagagccaggtcagaagctggactttgagactaggtctctgtggtcccacctggacccacagggaaggcagtgcataaaagcctcctgtgtttgaggctgagccgctgagaggctgagtggagttcactcacatggattgaggcccagttcctgggagaagagatgctgggcaggaaggtgtctgcatgtgggactctgtacagcccggtcctctcccacgtctgggaggggccagagtcagacaactgctgggttcgtccctaagagaggtcatctgactggctgttcagcctaggctgcacacacccccactttcctctaccaggccacaccggaggcagtgctcacacaggcaagctaccaggccacaacaacgacacccacctcacctctggcacctctgagtaagtactgggcccacggccccatgccaggagggcttgttgattgcttgggggagggaaaaatgagttttccttttccaacatgagagtgcctcctttctgtccaggcatccacgtacttgcaagaactcttgctcacatcagctaagagattgcacctgctgacctagagattccggcctgtgctcctgtgctgctgagcaggtaggcagctgtacaggcaggaattgagggttgcttgtcagctggggctgccggtgggggaagatgctatttcgagttgtcttccactctgcgtggttaatcctgccacctcacctcagctcccctgcactgcccaggagaccccagccaggcccaggaaggagggccatagacctcagaagggaggcatctaccgcggaccaaggcctgaggagctttggtgctgaccctggcatcagggagggttggcgcctggtccaggagcattccgcatcaatccccacttcctaaaggagtggggagaggtggggaaggtgggggctcccctcttacctcaccatttcagctccatttctggctccaagcctaagcaggttgatctttttttctgcagcaaggaaaggaacaggtgactggaacccagggtccagggtctcgggggggtcataaggagtccctgaagggccaggaaattcagctctgtgggctcctgtttccttccccagggcaaccagtagcaccatgtctgtgactggcgggaagatggcaccgtccctcacccaggagatcctcagccacctgggcctggccagcaaggtaggggctgttgggattttagagatcacttttagtatctcagctcgggctg

SEQ ID NO: 12796 - DNA, 2460 bp, Homo sapiens
aagggagctggaacttaaagtggtggtgtttgtccgagatgacggtgctcctgccctgtcacctactgcctctctccccattgcagtgtcaccacctatcacatgatgtcatttactagtatgtcttttgctgattgtctgtctctttctgcttaagcggaagccctgtgaaagtagaggtttctgtttggcttactgagtccaagggcttggattaggtctgggatggaagatgaacaagaggccaattcatggactttgaattcctgtaaaacagcctgaaatgatgggaaaaggagaggctctatccgacgtcaccagagtccttgagcgttggagtatttctttcaactgaagcctggaccagggctatccagatatacagagagggaggcggttctgcctattggaggaactactgtttccgaaagtgcaatgtttaacaaaggcagtggtctaccccggggggttgagacctctgaaccctgacgtggccataaagccaactgctataggactggcaacccagaataagaagagtgaaggaagccaacagagatccctggaggttgtgttagtttgcttcggctttgtattaggtactttgtggcttacacaacagacattttattgtctaacagttccagtggcagaaatcaaagggcccaacagggttgattccttctgagggctgtgagggagaatctgctccatccctctctcctagcttccagtgttttctggtaatctttgccattccttggcttgtagaagcttcaccctgatctctgccttcatctttgtatggccttctcccagtgtgcctgcctgtctccaaatttcccatttttgtaatgacatctgtcatcttggattagggcccatcctagctgccctagtgatctcctcttaactaattatatctgcaatgaccctatttttaaataagatcacattctaaggtaccgggactccaacacaggaactgagagcaggaaggaggaccacagtccaaccccttacacagtcgagcactggaggtaaatggtattctcgagaggaaagctgtttgatggctcttgggatagattaggttatgctccagcaactgcccatctcaattatcatcagcttaatacaacaaaagtctatttctcactcacactaagacccctgtgagctgcaggactttctaggacaactgtcttccgtgccatgattcttacaccccagattgctttcatcttctggttctaccagtggggcagggaagggctggggagttgcatctcatagtccccttgctggagaaacctggaagtgacccttcataccagtgctcatgttttaccagtcagcagcagggccctaggtctccatccctgcaaggggctctagagtgtagggaacagatggaatgttcacaagcaccacagcccctgccacagtgacttttttaggactggtatcgcagagtgtttacttaaggcggtggaagctaaattcttagcatgtgctggagagcaatgaaaaagatatttactttatgaattaaagctggagtcagtgtcagcccgaaggctgaaggaaaaagagcaacagatccagggagcattcacctgccctgtctccaaacaggtgaggatggggaataaagtgaaggcagtgctttggtgggaacttcaaggatagcctctggctttttccaggtttagaagctcatatgagacaggggtggaggaaaagaagaaagaagaataagaagagaaagttgaggccctggcccaagttagtgggaagggaaatccacccccattaaactctctccctggtggactgtggggtgcacacgtgaggcctgcacaggtgctggaacatggtagaggcccaggacatacttcctgtgaatgaatgattgagcggctgaatgaatgagtaccactaaaagccctcttttctattcccaaatgccacattgagcagaagggagcaatccttgctcagcaattggtagtccctttgggtgtgcaaatgagtccacagcctgcaacagcagacagtctctgccccccttagaggcgattgcagggaggtggctgaccgttgatcacacccagagctggttatgggaatttactccatggaaagactgcaaaactgcctgaaatgtgttttggcatcagctactgacacgtaaggtttcccaatcctcaactctgtcctgccagctgatgaggggaaggaaagggattacctaggggtatgggcgaccaatcctgagtccaccaactgaccacgcccatccccagccttgtgcctcacctacccccaacctcccagagggagcagctatttaaggggagcaggagtgcagaacaaacaagacggcctggggatacaactctggagtcctctgagaggtaaagagccagcgaagctgatgtcctgtcaagagcagaa

SEQ ID NO: 12797 - DNA, 2447 bp, Homo sapiens
gataaacagacaaaagggagggctagcagttcagggagtctcctggaccccacagttcaaggaggccaggaagacctcctagagcaccttgccctggcagccaaggcagtccctattttctttgatccacccagacagccacacacccccaccccccaaagggctgaggagcagctactgtctgcatagtcctggacgtcgtggaagtccacacgtcgacgcctccggtcttcttccagcaggtcactcttggtgccacataagtagatttggcagccctgaggcagaagacaagggtcacctccacaggccaacaaaaccccagcccctagtgttctagtgaggtctgttcacctacctcctctaggctgcgcagttccttcacccagaactttgctcgctcaaagctgctgctgtctgtgaggtcttggtgtgcggcatgcaggagacaaccaagtggtcaagggctgttctctggctagcctggcacccatcttttcttgtgagacagcccaaaccccccccccccttaccatagcagacgatggcagccttggcaccccgatagtagattctactcatggcctcatagcgctcagagcctgctgtgtcctaaagagtaaggcctgagtcaaacttaaggccacgttctccagaccccgctattttccagataaggaaacgggtctatgagaaatgggtctgtgaggccacaaatcaaccagtaataggcaggacctacacctcctcaggaatgagtctcccaagaatagatggccgggggacttacccaaatacctaatgtcacagtccggtctccgaccgacatcaccttggccacgaaggcggccccgatggtctgcaacgagagggaagagatcggggccataggtgcagattaccggccccccactcccccgcccaccgtgcctggcccctccggatgcactcacgttctgataaggccccaccagaaagcggtcgtgcacgtagcgctccaccaggctagtcttgcccacgtactccttgcccagcatcaccaccttgacgtccacgcgctgcccgctcatgctcccggggccgcttcagccacgtcagggtcctgagcggggacgggaggcaaaccccgatctccgctcggcccaggcagcgcccaagcctcagaccccgaccccaaacggcgccaacctacgactccagacagcgcgtcgggctcgagctctggccgtggccttgcacttcggcagcgccccgtgtgcccccgctgttcggccccgggcgccgattatccttcgaagaccccaagcctcggggcggcctgggagcgcgcgggacagcgtcctcaacagcgcagcacgccgccgtgcagctcgctactccgtcattcgctcgcctgcccggcttaagctccgttctggctgggaatcccaaccgaacctggggtctcccgcaacccggctcctacccgcagcgccgcgactcccgcgggagggggctagagggcgagggggcggggccgcaaggtcacgtggcgcgggcgccggaagcggtggctactgtgtggctgcgccggaagtggcgcgcggccggacaactcatggcggcggcggcggcggcggcagctgcttgggcgcggtgcggtggtgactgagctacgagcctggcggcgggtgtgcgccgagccccggcccggcccggccctcgcgtgcctcccaggctccgcacccctgatgctgcgcgggtgctgagcccgcttcggccgggacgatggtgaagtatttcctgggccagagcgtgctccggagttcctgggaccaagtgttcgccgccttctggcagcggtacccgaatccctataggtacgtggtatttggaagagcaaaaccgcgccatctcgctatctggagatcgaattatgggtaacccccaagtactgggaccaggaaggactcgatatcgaatcctaggtagaccttatcggggaagcggccaggccaggcctgcaaggtcctgaagggaggttgggcctgggtggtggtttacttgagaccttagtgtaagattcttttctcagtgtggtgagacaagaagaggcggcagtatgggagttgggagggatcttggagttggaaatcctatttctctgcccgtggcgctttcctggggtgcaataaatcatgaggtccattcctgctagaaggcaggaatccaggtcagtcagatggcgggagtgggaatttgccctgggatgggcccttaactctggtttgaaccatagcacataccaccctgcaaggttacgggaaggcgtggcctctctaggcccggagcctccaaatgggaatcccctcgggcagtctcttaggggcaagcttctgagggtcaccttcaccctgacacctgcagcaaacatgtcttgacggaagacatagtacaccgggaggtga

SEQ ID NO: 12798 - DNA, 2419 bp, Homo sapiens
gaagaaaacaagagccacctgaaaataaatacaggctcttttcgagcatctgctgaaatactgttacagcaatttgaagttgatgtggtaggaaaggaaggtgacttttcttgcaaaagtctttctaaacattcacactgtcctaagagatgagctttcttgttttattccggtatattccacaaggtggcacttttagagaaaaacaaatctgatgaagactaaagaggtacttctaaaagagatttcattctaactttatttttctgcgcatatttaactctttcctagcacttgttttttgggatgattaatagtctctataatgttctgtaacttcaatattttacttgttacctaggttctgaacaattgtctgcaaataaattgttcttaaggatggataatacacccattttgatcatttaagtaaagaaagcctagtcattcattcagtcaagaaaaaatttttgaagtacccagttaccttacttttctagattaaaacaggcttagttactaaaaaggcagtcctcatctgtgaacaggatagtttcgttagaagtataaaactcctttagtggccccagttaaaacacacataccctctctgctgctttcaaattccctagcatggtggcctttcaacattgattaaattttaaaatcctaatttaaagatcaggtgagcaaaatgagtagcacatcagtaattcagtagacaaaacttttgtctgaaaaattgctgtattgaaacagagccctaaaataccaaaagaccaggtaattttaacatttgtggaatcacaaatgtaaattcataagaagctctaattaaaaaaaaaaagtctgaagtatatgagcataacaacttaggagtgtgtctacatacttaacttttgaagttttttggcaactttatatactttttttaaatttacaagtctacttaaagacttcttataccccaaatgattaagttaattttagaggtcacctttctcacagcagtgtcacttgaaatttagtagggaaggatattgcagtatttttcagtttccttagcacagcaccacagaaagcagcttattccttttgagtggcagacactcgacggtgcctgcccaactttcctcctgagtggcaagcagatgagtctcagtaattcatactgaaccaaaatgccacatacactaggggcagtcagaaactggctgagaaatcccccgcctcattcgcccctctgctcccaggaactagagtccagttaaagcccctatgcgaaaggccgaattccaccccagggtttgttataacagtggccagtctgaaccccatttgctcgtgctcaaaacttgattcccacttgaaagccttccgggcgcgctgcctcgttgccccgcccctttggcaggagagaggcagtgggcgaggccgggctggggccccgcctcccactcacctgccggtgcctgaaattatgtgcggccccgcgggctgctttccgaggtcagagtgccctgctgctgtctcagaggcatctgttctgcaaatcttaggaagaaaaatgtccctagtagcaaacgggtgtcttctgtgcataaataagtacaacacaattctccgaaagttcgggtaaaaagagatgcggtagcagctgccctgtgtgaagctgtctaccccgcatctctcaggcgctaagctcagtttttgtttttgtttttgtttttttaaagaaaagatgtataattgcaggaatttttttttatttttttattttccatcattctatatatgtgatggtgaaagatatgcctggaaaagttttgttttgaaaagtttattttctgcttcgtcttcagttggcaaaagctctcaattctttagcttccagtttcttttctctctttttctttgttaggtaattaaaggtatgtaaacaaattatctcatgtagcaggggattttcatgttgagaggaatcttccgtgtgagttgtttggtcacacaaataaccctttctcaattttaggagtttggattgtcaaatgtaggtttttctcaaagggggcatataactacatattgactgccaagaactatgactgtagcactaatcagcacacatagagccacacaattatttaatttctaactctctgtggtccctagaaaaattccgttgatgtgcttaggttaaagttctgaagatacccgttgtacccttacttgaaagtttctaatcttaagttttatgaaatgcaataatatgtatcagctagcaatatttctgtgatcaccaacaactctcagtttgatcttaaagtctgaataataaaacaaatcccagcagtaatacatttcttaaacctcacagtgcatgatatatcttttcattctgatcctgtgtttgcaaaaa

SEQ ID NO: 12799 - DNA, 2412 bp, Homo sapiens
cataagggtgaattctcagccacagccaggtgtgggctgtgccaggacatactgaccttatttcctcttattctctttcttatcttcccatttgcagctgttcctttaactgagtgcagccactagtctcctggttcctgccaaggaggaaattcagaggctgaggagggaggatcgcttgagctgaggagttcaaggctgcagtgagctatgatggtgccactgcacaccagcctaggtgagagagtgagactctgtcttaaaaaaaaaaaaaaaaaagacattcaggaaagcttggaccaccagtatactcaattagaccattaaatcttaaatcgtcacatggccttgagaaagccacatagcatctctgaaatatagcatatcatagcatctctgaaacatagcatatctgaaaataaatacaccctctttgcttacctcacaggttcttgggggaatattaaatgatatattatgtacgtgctttataagcagtaaaatattacataatgctgtggtaaccctcacagggttgataagctagggagccttaagcatcacctattaccccgtatttattgtgtactgggccttcttctaggcacttcaccgatcttaagcccttgaatctgctgagcatcccaatggggcaggtactgaacagggaagttaagtggcttgtctagggtcacacagtaagtggcagagctgacattcaaggccaggtagtcaggttccagaacacacattgttaaacaccagaccaagctgcctcctgtgtgccccactgacacttcctgtgtcctcctccatgagcccctggcagagatgacaattgcttgccttaacaatagataagctaccagaagtcagggcctgtgcctcattcacacacgtccacagtgcctgccacatagctagagttcagtagatatttgttgaatgaacaaataccctccagggagggatacaataagtctgatacaactactgtatttttccttcattttttcttggctaaccacactcatttccttcagttgtttccaaaaggaggttggcatctctcactgtcctcattgacctcctttgcactttctccacgtcaacagtgacccatctaaagccgactactgtgacatgaacactgcacttgaagagcctgaccagcgctgggctcagtagaactatcctttcttctcccatggtgtatcctcactgtccaggactctcttctcagaagcccactccttcccctgtgctgtttatatgcttaatgaaaccaagtacccaaagtgaccgttcaactgttactaggcagctaagtagactccattaaaccttttccttccttcctccccttctttctttctctcccattcttctttcattcttctcgtccttccttctatcctttcttccttcctgcctccttttcttcctctcctctgccctttctttcaggtcttttttgtggtaggaactggtaagaaaaggaaaggaattccctaagattttaaggaaacaacaacaaaaaccaggttatgtttggtgagagagttggggcaagaaactgcatcttctaatatggaatccaggtaatttatcagttttttttcatagcatgactacggtgagatttcttgtaagaaaaaaaaaaaaataccagcatcgctggcctcatatattggattatacttaaggggatcaagggataagatgtttgaatttggagatgtcttgaaaaatcctgtggtgagcacaaatgtttgcagtgtctctgctggactcctcaaattgggaaaaaagagactctggttctcatcatagactcaaaacctgaggaaaagcgagatgcgattattagataaactggcaatgacacgcacaaaaatgtgtctattccagccagggcttttcttttcagttgtttgttttggttagagatgactttggggaactgcatgtcccactggacattccaagctgcgttgtcggagtcgcgggtcgcggcctccagtcagcggagccgccgcccccagggtccgccacccagaagtcggcggaggggggcccgccggcgggagcgcgcgccccggtcgccgtctgcgggtagaagcagaggaaagacggtggcctgggagcgcgcgaggccgcacgtgcgcgcgcccgcccgcccgccagccagtccgctcgcccacgcgcccacgcacgcgcccgcccgcccgttggcccgggaagtctcgcgatgccgtagccggctgctcccgctgcgggtggctcgggctgttgctgtggtttcctgagttgctgctgctgcggcggcggcagcggcgtctgtgcttgtggaggtgtcggcctctgggcggatgttgacattgtgttgttgttattgctgatggtaatggc

SEQ ID NO: 12800 - DNA, 2396 bp, Homo sapiens
gtcagtgtgtttcctgaccctctggtggggccactctttgcggggccctggggcttcactgggaggagccaagtggggcgtcagtgtgtgctacagtggctggggcagtgccccgcagaggcaggtgcgtgcccacagccgtcagcctttcttctggctgcagggggctgccaagatgctgctgcactcagaacagcacccaggccagctcaaggacaacgtcagctctcctggtggggccaccatccatgccttgcatgtgctggagagtgggggcttccgctccctgctcatcaacgctgtggaggcctcctgcatccgcacacggtgggcccccgcgctgcccgcttccctggtctccagtccttgcatggcagaggcctctctcacacacatctgctcattcacgcactcagcagatacgtattgagctccagcccagtgttgcgcaggacacagggggccccgaggttccctgggttactgtgggcagtgcccctccccaccttccgtttcctgcgaggagggaacatccatagagggacccggatgctgtgccctgtgctccccacataggttcaccattgtcatagctaggagtgtcatttgagccaggggccacaccagtggggtggcggggtggccagccacattaggaaacttctgtgggggcccaccttcctcctgccctcgctgtgggattaagttagaccagtaggacacgcagcaacatccaggcacaaggaaaattccatggaaggtgaaagaagcaaagagcaagagaaagacagagtttgctgtttgcctgggatcccacagctggtcaaaggcagagccaggctgggagccgctgtccccagttcaggtctgcagggtgggtgaggacgtctttctcgccacactgcccactctccagtccagacaccctcagactctgcgagtgccaccctgtaacagtgaggggaacacgaggggcctggcctcacctccagcctgcaggggagacaggtgtaaacccacatcccgtggtggggccacgagaactcaggtctggggggcactgcggggagatttggtgatgctgagctgattcgaatgaggtgagaaggagcccagcagctgtgtgggggcgtgtcgctggcagaggggaataaaggtgctgaggtgagggtgacagcatcgcccagggctgactggcactgggagctgtgggcttcactccctcttcctgggtgcacgcttgtgctccaaagccaacctctccctgcctctctagggagctgcagtccatggctgaccaggagcaggtgtcaccagccgccatcaagaagaccatcctggacaaggtgaagctggactcccctgcagggaccgctctgtcgccttctggccacaccaagctgctcccccgcagcctggccccagcgggcaaggattgacacgtcctgcctgaccaccatcctgccaccaccttctcttctcttgtcactagggggactagggggtccccaaagtggcccactttctgtggctctgatcagcgcaggggccagccagggacatagccagggaggggccacatcacttcccactggaaatctctgtggtctgcaagtgcttcccagcccagaacaggggtggattccccaacctcaacctcctttcttctctgctcccaaaccatgtcaggaccaccttcctctagagctcgggagcccggagggtcttcacccactcctactccagtatcagctggcacgggctccttcctgagagcaaaggtcaaggaccccctctgtgaaggctcagcagaggtgggatcccacgccccctcccggcccctccctgccctccattcagggagaaacctctccttcccgtgtgagaagggccagagggtccaggcatcccaagtccagcgtgaagggccacagcccctcttggctgccaagcacgcagatcccatggacatttggggaaagggctccttgggctgctggtgaacttctgtggccaccacctcctgctcctgacctccctgggagggtgctatcagttctgtcctggccctttcagttttataagttggtttccagcccccagtgtcctgacttctgtctgccacatgaggagggaggccctgcctgtgtgggagggtggttactgtgggtggaatagtggaggccttcaactgattagacaaggcccgcccacatcttggagggcatctgccttactgattaaaatgtcaatgtaatctaatgcaaaagtctacagattcaaatgttagtctcatgcaacccctccccacccctgccagaaacagaataatgtttgaccaaacactcaggcaccctgtagcccagtcaagtggacacatacaatcacccattcca

SEQ ID NO: 12801 - DNA, 2393 bp, Homo sapiens
acgtgtcagtgcacagtatccaggcccttgggcaggtctaagctcccctgtgttctatgtccccagaacatgctgtttgagagcatccaggagggcaagtacgagttccccgacaaggactgggcccacatctcctgcgctgccaaagacctcatctccaagctgctggtccgtgacgccaagcagaggctgagtgccgcccaagtcctgcagcacccctgggttcagggggtgagtaccagccgcacgggcggcaggaggggtatgggggcgctgcagggtggcctcagagcgagcatgggaagccctgagggtgtagcctggacaccctgagatgcactgaggcttgagagcacaggctctgccctgggatgaggggtgcagccgaaatccccaccgcccgcctgtgcacggtgcccgctggccagccaggcggctcccaggagcagctactcagagaaccttcctggagggtggtggggacccacagcctgcagcaggctggagcgaagcgggcagcgagcccagctcacatagaccccagcctagcctgccgtcagtctcaagcccaggctgtgcctccacccttccctgtgtggcctccagtcgaggaggagtcgggtgtttctcctgccagaggtcatctgagctgagctgccaccccagggagtgaggatttactaaaaatagaagctggggtcactctgtgtccccaggcgaggggctgggggcctccaatctccttgcagaagcatccagagacccatgggttaagaggggggcggaggtgggtttgggctgggaacagccgggagagatggggcttggggctctgcccccaccctcactgggtcctgtaacaccaggcctcagcctggcccagcctcgggttccctgggcagggggacatggagcctcaccatagggacctcggggtgggcgcttggctcccggggcacccaggtgcactcctggtctccggtggggtcctggtgatgggatgggcatggcatcccttggccagacaccccacccagcgccccaggcggccccagctgctctccagccctgcccccgcccactctcgttgcagtgcgccccggagaacaccttgcccactcccatggtcctgcagaggtaaggcccgcaggggtgctcgggacccctgagtccagggggcggggtttccaggttaagacatttgtgaaagacccggagaactgctttggggtcggggaggcaggcaagcctggtgactcagtgaagctcccggtggggccctggtgctcagaggagccccagggtgggggctgggaggggggcatgaagccccttcccccagggccttcacagaccccaggggtcccctgaggggtgcctcttggtgaccacctacccccaccccgtttcccaggaacagctgtgccaaagacctcacgtccttcgcggctgaggccattgccatgaaccggcagctggcccagcacgacgaggacctggctgaggaggaggccgcggggcagggccagcccgtcctggtccgagctacctcacgctgcctgcagctgtctccaccctcccagtccaagctggcgcagcggcggcaaagggccagtctgtcctcggccccagtggtcctggtgggagaccacgcctgaccctcccatctcccctctgtacataggtcacccgtcccccaatcaaatctaaaggttttttaagctatcgccagccggtgtccagcgggctgcccctcctctgcctggattcccaggcactaagctcagctgaggggggtgttttatagaaggtttttgcttttgggttttttttttcctgtttccacccctccccgttattttttcctttggatggttaaaagcattgcaggcacccgggaaggtgagcagagggtaggtgggtgggcttgtcccctccccggtcccccgccctgctcacctctactatgaaggtgcccccaggtcacctgtgctgcccgccatctgcccacgtggcttgcagtgactcaggagagcaggcccacagcgtttgccatcttgcagagctggggaggggcacaggaccctgccctcgtgttccctcccagcccgcagtatttcagggacaggctcttcccctctatccctcaccctgagagcacccctggtggcttggttggggaagggaggggctgcctgtctctggaggtgtcaggcaggcaggtggcaggcagctcacccacccaccccatgggatcccccagcccttcacccgcgcctgccttgtccccatgatagttgacaatcggggcttcctgcaaggcccgtctgtctgtccaggactcctggtggccagattcggcctccgaccttgaccttaaactgcagctgacc

SEQ ID NO: 12802 - DNA, 2390 bp, Homo sapiens
tcttctgagttctgttgggtgaatagtatttgtcgtgtactctgacccacagaatttagaagtcctttggaagggaggttgccgaaatttcatacaaattttcctttccctcagattcagtggaagaaggagagaaggttgtgaagacagccctggatgcttttggaagaataggtgatgtttctttgtgttatggctcttgtggagcaacttctaccttcctaatgaaatatttttaagttgactttcatttactaaacagatacctctttcctcataatcacattttaaaatttgatttataagttaattattgtacttatttcataaagggtttaattgaggtggcaattttatggatatagtgttgagtttgtttttttgcaccttaagtgctttaaaaaacttacgagcgtttactcagtgccctttttaaaataattcagttaaacctcaaagatgtttataagattaaaaaataaaccaatattttggcaatagagtacccagtggattcttttggataattataataatttggattaaaataatccaatatcttgcaaattacttaagatgatttctctataataaaaatcttaatttttaagaagtatttcaaataaattgttgagtttgttatttctgtagctaatcttcccagtttagtcccacacactcttaataaaagattatttaactactagatggagacatcacggaacataagcccaacatgtttacaatctgaaaaacattacttattcttaattgaatgtgctctcccttttttgtttggtctattacacttatttttctaattttgtttgattgaactcataagaaccatgttcacatatcgtctgacagggatagaaaccacaaaaatgtgaaatcatagggtgaaaatagccacaagagggttgaaccttaaaaaataattattttctttcatagtgagaaaataattatgtatcaagataaggcatcagtttgtaactctaatggttttctttttggactttttacttttgagtggcaagggaaaaatgtaactttaacttgctaagtgaattttgaggttaagtgtagaatggcttatggttctgattccttagaacctaagagttgtaaaatggctaattctataattaagtggatagaattttgatagagaggtgggaaaatttatagatgttagtttgagaggaaggtgcttgatataatgtgatacttaggcttttgtgagtcaactttttttgatataggtatagacttttgttttgaaagcactctttacctattatatttactttttcatggttaaaaaacgccagttttgagagaaatgtgagttgtaagcaaatgcaaactaatatgcttgcttttagatgtaacttgtatctttttatattgtagatgttgtggtcaacaatgctgggtgagtatttctttttcatttttagtgatgtgtgtataatttttttaaaaagtatatactttcctccttttaccctatacaacattgattttttagaattctgagggatcgttcctttgctaggataagtgatgaagactggggtaagttgtttttagtatttctctggggaacatacttatccatttagcctttttagtatttgataaatttatacatttaaggaaaaacctgcttctatctacttttgctgctaatataaatgatgagtaaactgtatactgaagacaatgaatagttagaagtagcctcttttagaaaacatttaatacttttaaaaaatgttaaatcatttgtttagaagatatctaaaaggattttatttcttcaggtttccctctcccctttttttctccttaagaggttgtcagcattttctagaggtattaactcttaacagcctttaacgtgcttatccagctgtgtgaatctttttcaagaacaggagcaggatatttaagggagtctagtgcactaaaaatgatggagattttagaacaggttaggacaaaacctggatataattttgaagcttctagtaaataggaaagttttccattctttctgaattggaaagattgagtttagataatgaacaaatcacagttaagaattttttttttcttttgctcctctttgtgcttactttcattggccatcagaactaaaatgaacagtggtggctgagacagagggaagcatggcaactgaggtgaaacaattgtatcattgtttatagagtgtgttttgggggaatagtgcctgactgtcttttggaagaagagttagtgtctttgatttagaattaagctaagaagagcttttagtttctgcttcccttgtaacaactggggtaaaaaagaagctgagaaagataggatttgctggc

SEQ ID NO: 12803 - DNA, 2324 bp, Homo sapiens
gacctagtcatggggtgacattccatcacctttgcccattggttagaagcaggccaccaggtacagcccaagctcacggggaggggtcatacaagggtgtcaataccaggaggtgaggggtgctggggccatcttatgagtctgcccactgaggtaactaacaaccttgaggcctgacacagtggacaaaggcccttattaacagcagagaactgggaactttatttatttatttatttttgagacagagtctcactcttgtcacccaggctggagtgcaatggcatgatcttggctcactgcaacctccacctcccaggttcaagcaattctgcctcagcctccggaatagctgggactacaggcatgcaccactacacccggctaatttttgtatttttagtagagacagggtttcgccatgttggccaggctggtctcgaactcctgacctctggtgatctgcctgccttggcctcccaaagtgctgggattacaggcgtgagccaccgcacctcgctggaacttaatttttttagagacagtgtcgctctatcacccaagctggagtgcagtggtgcaatcctagctcacttgcagcctcaaattcctgggttcaggtgatcctcccacatcagcctcccaagaactgggaactaacggctgtttctctgctgtccttctcaagaaaagggaggctactgctaccccactggggacaatgctgggtttccctttaggacaggctctgagacaaggcggaggtgctgtttgtggccacagagcaggggactctgggttgcaggtgtggcctggctaaagtaggctttactgggctcctctctgcctgcatcaccccccggctgggcggttgtctctgaggccaaccttactccctgctgggcaggctggacagctgccctctccgtttgcccctctaccacccaaaaggcaggaggctctggagaccaggaccctgcccgccacggcctgtgtcccaggcgtgagggggtgccccacagacctctgctgagctgctgctgaatgacgccccttgggggtcctgccggaaggtcagagcaggggtgcactcccataaagaaacgcccccaggtcgggactcattcctgtgggcggcatcttgtggccatagctgcttctcgctgcactaatcacagtgcctctgtgggcagcaggcgctgaccacccaggcctgccccagaccctctcctcccttccggggcgctgcgctgggaccgatggggggcgccaggcctgtggacaccgccctgcaggggcctctccagctcactgggggtggggtgggggtcacacttggggtcctcaggtcgtgccgaccacgcgcattctctgcgctctgcgcaggagctcgcccaccctctccccgtgcagagagccccgcagctggctccccgcagggctgtccgggtgagtatggctctggccacgggccagtgtggcgggagggcaaaccccaaggccacctcggctcagagtccacggccggctgtcgccccgctccaggcgtcggcgggggatcctttccgcatgggcctgcgcccgcgctcggcgccccctccacggccccgccccgtccatggccccgtccttcatgggcgagcccctccatggccctgcccctccgcgccccacccctccctcgccccacctctcaccttcctgccccgcccccagcctccccaaccctcaccggccagtcccctcccctatcccgtccgcccctcagccgccccgcccctcagccggcctgcctaatgtccccgtccccagcatcgccccgccccgcccccgtctcgccccgcccctcaggcggcctccctgctgtgccccgccccggcctcgccacgcccctacctcaccacgccccccgcatcgccacgccccccgcatcgccacgcctcccttaccatgcagtcccgccccgtcccttcctcgtcccgcctcgccgcgacacttcacacacagcttcgcctcaccccattacagtctcaccacgccccgtcccctctccgttgagccccgcgccttcgcccgggtggggcgctgcgctgtcagcggccttgctgtgtgaggcagaacctgcgggggcaggggcgggctggttccctggccagccattggcagagtccgcaggctagggctgtcaatcatgctggccggcgtggccccgcctccgccggcgcggccccgcctccgccggcgcagcgtctgggacgcaaggcgccgtgggggctgccgggacgggtccaagatggacggccgctcaggttctgcttttacct

SEQ ID NO: 12804 - DNA, 2318 bp, Homo sapiens
cattgctttccaaaaaggttgtcctggtttaaactttgaccagttctgtatagaggtggctatcttgccatagtttcccctgcattgattattcccatttttacatattcttaccaatttgattggtgtaaaatggtatctatttgatttttatcaatggtgagattgagtattttctcaaatagttgtaaattgcatctgttcttttgtgaagacaactagcagcgtatctaagaccagtttgaatattttttgtcttttttgtcttacatattcatttataaaggcagatttccagtaaaactgattgcccccaagtttgggtataatagagtcatttcactttgaccttcctcattaatttctaaattgttcacaattcaaaaagttattaccagttgtggagctacctttttttttttttttttttttttgagacagggtctccccctataatcttgccctgctggagtgcagtggcatgattataactcactgcagccttgacttcctgggctcaggccatcctccttcctcagcctcttgagtagctagggctacagacatgtgtccccatgcctggctgatttaaaaaaattttatttttaggccgggtgcggtggctcatgcctgtaatcccagcacttggggaggccaaggtgggcagatcacgaggtcaggagttcaagaccagcctggcgaatatagtgaaaccccgtctctactaaaaaaaaaaaaaaaaaaaaaaaaatagctgggagtggtggcgcatgcctggagtcccagctacttgggaggctgaggcaggagaatcgctggaacctgggaggtggaggttgcagtgagccaagatcgtgccactgcactctatcctgggcaacagagcaagactctgtctcaaacataataaataaaataaatttatttttagtagagatgaggtcttgctatgttgtccacactgggagctacctatttttaaatagtgtttaagatacatggtctgtaaatatatagacactgcttagaaatgaaaagcagcagttaaatttcttggggaagttggggtttatacaggaaattgtcacaggtactcaggaattggaagttgtggctggggatgtgtatggaagaataggcactgtaagtagtagacctgcagaccagtctgccctgatagaacattctttttttttttttttttttttttttttttttgagacggagtcttgctctgtcgcccaggctggagtgcagtggcccgatctcagctcactgcaagctctgcctcccgggttcacgccattctcctgcctcagcctccctagtagctgggactagaggcgcctgccaccacgcccggctaattttttttttttttttgtatttttagtagagacggggtttcaccgtgttagccaggatggtcttgatctcctgacctcgtgatctgccctcctcggcctcccaaagtgctgggattacaggcgtgagccaccgcgcccggccctgatagaacattcttaacccagctctccttcaatagctggtccgatagaaaggcaaacaaatatacatctggagtcatgggttctaaccttacctctgaaattagcctgctttgtaaccattcacagattaacctttctgtttctcagtgtttacatcagtaagttcctttcagctctaaacatctttgattttattattcaggggacagaatgttatccttttgaatccagaacctttcttgtgaatatctgtgaataggtctggaaaacaactcattgttgttgggaactacttggaggaaaataataggaaaaatttcccataccagctaaacttttagggaatgtgaacttccaaatccttgtttattttcttttaatacattaaaaatggtaaaattaaattatttttatgccattttccctggactagagaattgtagattcggtgttttctctttcaacatgccagaaaacgacaggttaagttgaaagagtgcaggaaagaaatttagagagaaaataactagctgcaaaacccttcggtgttttaagagaagttactatttacacaaacgtggcctcggcttaatcaaatgctttaatttaaagtcacaaacatcccttttctggcttgagaaagctggtggaagcagctcagtgctctgtgttcgatttgttaggtcttgctcagtgtgcagaactctgctggcagctgagaggggaagccggaaagaggcaagttcctggtgcaaaggtggctctgcagcataatttaggcattggaggagctgtggttgtaacact

SEQ ID NO: 12805 - DNA, 2300 bp, Homo sapiens
atgaagcaagggagattttcacatagagtgaatatggcacgggggtggggaggccagggccatagaggattgtgctttctctcccattgtttccagagattctctctttctctgatttgaggattaataggagattaggatcaggggttaattgtgtgcttctcctgctactgcactgaggagaggctggtaggtggatgtggacagcaaagcggaaacctccagcaggcactatctaggcagaagctcaacaagtgtagtgattctttcttctgtttccctggtgaggcaccaggagggtcttttctcctctccttacatccctccactcttgctctccttgcagcccagttctttcctaactttctttaaatccctttcctctaacagggtgtatagaccttagttagaaaaacaggtagtctctaaatgggattgctctttattgttaatgaaatgaatacccagggactgggcttcccctccgcttgccctgggtttgatgtggttgtatcccgtgctatcagaggagcccttccttcactcaagtgtgttcccctgcccagctctctccgcagactcctgctgggctgagctttccctgctcttaagagtcaggagtggctcttgctgggatggaatgacccgtctttggggctgcctcatgagcggctcttgtgaacccggatcagttccgatgtgtaaactctaccgcctggccttcagcgaacagatacagatttctgccaccttccatgaccctacagttcatgggactgggtctggggcagtgccagaggcacgcatggaggtgtgattctaggtgagtcctgcggaaaacctctggcccacccgtgagtcacggacagaacatgcagactcaggccttggtgacataagctccgcattgctaaaaccgcgtgacctcgagggctgactggcctgagaaccctggatggcgctctcggccacccccacctcccaccccaacctcctgggcttcggtcagaatccacagcccgtgcccgaagagcgcttcccgcctctggcaccctaccttcgctcagctccagggaaaaggggagagggcagctttctgcagtcagaggaagagtacattttctttggctgctctaccctctgaagtagggcggccagctgaaggaggacacacttttgaggggcccagaggttgtccaagcttccccctgccccctgaagactgtgcactgagctgggcgcagttctcgggaactgtttccacccagattgctggggggcgggggggtaggatgagggcagagccgagaggctgtccaaggtttgggagagagaaaagtttctcccaggactcgaccttggcctccagcaatcgcgacagctaaaaacgggtgtctcgcttcgacaatagatccccgcggaccttctggcacctggttcactagcgcccgcgaactctgcctcgggagacttattgaaatccggatgctcaagccgggaggcgcgcagtaaccaggaggatgagagggccgggtttgggctaggaaagcggccttttaaaacagatgtcagggggactgcagccccgagccatgagaaaaaagttaaaggcgagatgacacgcactgaattggggcaaacattggaagaggagacaaaactgcgtgcttgagcaccggggtgcggggagggggggacaaaacccgtatccagtgcaaattaaaatcttgggagtaggtgggggctgctgcgcgcccttcaccctcagttcccctattaaggattctgagtccccatgcactcctgtcctctggctccttccttcctctccgctcggccggtgagaggcggccgccggcgccccagcagcagctagatgtcaggcgaagcccggagcgcggagcgcggggaagggaggggaagggaggggaggggaaaggaggggtggggcggggagcgcgcgcgggctcggccagtgcggggtggtgggcgggctgagcccggggacggcgcgggaggggggagggaaggggggcagctgtgggcagggagccgggctcggccgccagcactaaagatggagaggcgccggggccttgcaggggagggggctcggcgttgacgtgggacgcggcggaggcgcagcagccggtggtgatttgctaacctcgcagcagagaggagttgagggcgatgagagcgggtactgcgaactgccgggcgatgctgtcgctgccgccgtgatacggagagcaacagttccccagcaacacccctccccgacacaggcacacaccccc

SEQ ID NO: 12806 - DNA, 2300 bp, Homo sapiens
cctgggataaaaggctgtttcataacaatttccttttgttctttgtttaagccattactctaaaaggagcctccgattaatctaagtaaatgcatcattacagtactaatccgtgtccttctgtcagtgtctgttttaattaaataagaaatgctagcagaaagatatcacgcacaaagctgtgattggagaaagaagcactggttgatcaaggaaaagattaaaaagagctttagtgttttgtccatttgcataattctagatgccacagagtttcaggttgaaaagaaaacttacaaaagagtttaaaacatttcattcttacagatttaaaataacgggatttaccaatgaaattctaatcatcccatttatcacattaaacattccacagcaaggagcagaacggcttggggtgtgtcttttaaaccttttatgcaatattgtcttgtatctctgaaaacatacctgtcaaattttcatgtgtttcttcttattttaggtaaagttgatggtgaaacctggttgtgggcatacaatgtgatttatttttcctttttaaagtatcttgcaacttttagtttagttttgcttttttaaaaaatggctttctattgataacatgttaagaatttaggtgcttaattggttgttaacaataaaagtatatttaataaatgcttatgaaatgaatattgttacattgatacacagaaactcttcttagcagtagtgttgcagaattcccgtggtgagggctttcttaatataccggccattatttgatgtaatgaaaagagaaagtgtgcaacagtgagattgttaattaatttagcctaacaagatgaagataaatgaagcaaagcacagtttgaatgaagcaagaggtcttatttacaatttaatacatttttatataatgcagatttcacttggtaaaaaacaaacagaccctcaccccaaatacccactaacagcaaaagtacgtcccttccccacaattcaacactaaaatcttggtttgactttacagaaaacatgtactgtggccccatatggaagacacttttacagtgtgtaaacagtgcttttctacagctaagaatcctacactagttaacctttaacttcagtattttgttattctcaatatagactggggatgaccataagaataattatctagaaacctttgggtttcttgttctccaggttatcctgagacatcttgctttagttatttaataataattttattttaattcttttttttttaaccaaagaagttcaaaagtgggaaaggaaaaaacaagctgtgtgcctttttacatgtgcttgaatctttagcaattgtacagaattcttaaattagcattattttttaaagtctccctttcagtgattaatgagctttatccagtatttgaccttttatcattcttgttttctgctcagaagtacttccttccttcctactgtagttagaaaagactgtctcttatcttatgttactgtaggcagtggtaacagggctctctacaaatggtgttattatggtcactatgtttttatctcaggggtcacgaacaaatccatgcaactgcttctaaggatttcaataaataggactttttatccagacaatcgccttttatgttacttttaaacaaaactactagtccatcaagagtttcaaaagaaaacaattctacagagtgccggtatggccgcacagaccaatcatcatggcacccattctccagtcctttatttttcaagtccacaacaataggttgttgattcaatggacaagaccagaacaattaagttctctgtttagcagcagtgcagcattttaatgcccttctctaataatggtctcattattgttattctaagactgggcctcaggaggaggaatatttgctggaggtacgtcattattttgcaaatttcgattagctcatcatgttgtctgtagtgtgaaaatcgtagctaattagggcagccagttagactaccagcttttgagcttatgagttaaaaggtagcatacttgataggccagtgatgtgaaaaaggtggtaaaaaggaggattagagcagttgccttagtaactccaacttccatctgtgagggaacaatggacttgtgtttctcccccaccttggtgtaaaaattggttttgttttgaaaggacagggttctttttatgacaatctggaattcagcccaactgagtgtagttttagttgttaggagagaccattggggataggaaagatgaaaggtcatggtg

SEQ ID NO: 12807 - DNA, 2300 bp, Homo sapiens
gccacaacctaaaagaaaacagacacattgttccatctgatctactgacagctaagacagtcactccatggagtacacaggagattcgcaggctgctgccagggctcattctgttcttgtctttcctatgactttactcaggattccattatcagcaacttcaccctccagctctctccatcctcctatgaaagcctcagggacatagaaataagcttgtctttgtaaaatgtgccaggatctccgtcttagataaaagacgactatgagaaaagaaattatttcattccactatgttccatttgatttctgctttcaagcaataaaccaccatggcttgagatgcttctagtgtttcatggagaattgggactatttccccaacatgccctgctcttcattcctctttgcttcttccctttttgactccttggacccgaggggcgaccatgagtggcgaaatttctgaccagctagaataccaggcaggtgcaggctcttgaagcaccaagactggctcaagagattgtaaatggatcagtcaagtgcatgcaccactgacggccagtcaggagagcttccatttgttaaaaatataaaggacattcctatcatcaagcatcacaattaggcaatctcaaagaaaacaatattagctctacttggcctatgttacatgctctaagaaagtattttagaaaagttttttttttcaacataaatttattgaaggatcaaacgtgttctctttcttggtctctttagctcgtaaagtcgttttggggatttcgtgaatctggcaaataaaacaaaacaccaatgaaacgctgagaaatgattatttcccttatgtattttagcggcctccaggcagacctgataaatattcagcgagtgattagctggtgcatccccacctgcgtcctttgcatagccatgcccgctactctttcacaggcagttttacttggtaagttacaaacgtactggctgcactctgcacctgacagtattgcagtaattagcttgggatgcaaaatgatttctaaattaaggtcctggacttgtaaaatcaagaaagcctgataatcaacatcgtcgctctggtggccattgaataacgggataaatacctaagacaagtcctttaaccatcccacgtggtgataaatgcccgacgtacaaattaaaagtctctaccacacgcaggtgaaataaggtataggtcaagaagagaaggtaggggaaagggtcaatgcttaattatttaaaaatcgctctcttcctcctgtaggaaggtctaggggctaggtcttttagtgcacacgtgatgaaagtgacattttggccaggtgaaacctcaagctggtacaggcagctaaaacacgggcgtcgtgccctggagacaccgggggtcctgaggatggggaaggggctccctgctgcgggtgctgaggggttaggaggtgagcaccgggcgggaggctccggggcaggggctgcgcgtggagcccactcccggacgcgggctcctctcggcccggcacgggtggcgcaggactccgagcccgtcgacaagagagagagcgggagtgggagaaggaagaccgggagaggaggaggccgggcggcaagagcggaagaagaggaggagaactgaggcggaggagggcgagagggaggagagccgggcgcaggaaggggaggaaagaaaaaggcggcggaggagcgcggacccgccactcccggcctcctcccccgcatccccactcgggccggccctcccccggccgccgccgccgccgccgccgccgccgccgccgccgccgccgcctccccttgcccagtgttcccagcaccgcaaggcactcgctgcctcctccgcactcggtccggtccgctcagcgccgccgccgccgcaccctcgccgcacccccgcgcgcgcccggcccgcgcgcccccgccgctcgtcctcgcggcctcgcgctcggggcatgcgcggtgggcggtgccgctccgggccgcctctgccgccgcgagtaggaagcgcgagcgccgggcaccgggctgtcagtgagcctggggccagcgggcgagccagcggctccggctcccgctcccgctccgcgcagcaccagcccgactctccccggcccccgccgcgccccctcgccgcgacctcggccaccggcccgcgccccgcgcccggggtcgccccgagcccgcacctctcccccgccgcccccgcccacccggccctccgcggccgcagctccccggcggaggcaagaggtggttgg

SEQ ID NO: 12808 - DNA, 2300 bp, Homo sapiens
tggtcatcaggatgtgaggcggtgacggacacttcagtgctctgacgcactgtggccccggggaagcgtggtgtctgcagcctcctgggccttcccttctgcctggcttcctcctcctccacccgtccacctgtgtgtctgggtcaggctggcttctgcatctctgtggacagacctctccccgtgctgcagctgttttccttgggttgagcactgaaaagagcccctttgggttaggaggcaggtggacttccactcacatggaggaggagcctcctctgcccggaggagacggtgctgggagaaaatgtagctgcaggtggagattttctgataaccaagagtggatgttgtctgtttactgagtggaggttggggccggtgccagggttgtccatctcccctctgtcctgcatggcatggtggcagagataccaccatacttcagaggcagcagcaccctcgccgggtgccggatctcccagggtccacctgtgctgccctgccctggggtatttggagctgagttccaattaagccaagaaaaacagattgttttacttagaatttagaaattctcctttttttttttttgagatggagtctcgctctgtcacccaggctggagtgcaatggtgtgatcttggctcactgcaaccctgcctcctgggttcaagcgattctcctgcctcagcctcccgagtagctggaattacgggtatgtgccaccgcacctggctaatttttttggtatttttagtagagatggagtttcgccatgttggccaggctggtctcaaacttctgaccttatgtgatccgcccgcctcagcctcccaaagtgctgggattacaggcatgagccattgcgcccggcctagaaattctcttcataaaacgtgtttgagattggcacaggaagtttcaaacagaatcaggattcaccataagaagcagataaatacatttgaggcacccagggtgagtgatctcagcggaattcccctttaagcttcctagtagcgcgtgcaaaaaggaaaacgtgtggatctaagactgtgcacaaacaaaagctgttcttctgggaggaaccaatccctcagcaatcacacttgactccctcgaaggaaagctggaaggggagagggcgtcaggatgcaggtcccggtgtctctgtgcagctcatcctccttcagaggccgctctgcttctgtccatccctccaattgccagtggtgtcagcatttggggccgtgatcagatggaggaagactggcaagcagtcacccccgacaggactctctggctcagcctccccaggaatatgctgctccccaggcacagcggaagacctgctgcgtttcatcttccggctgcctgtttaaagcaagggaggccatgcccccagcggggtcccttgtgcctggacccaaggcaagaatagctcaggcttgttcctttttcctcaagttcctctcgggcgggcacggtgtgtcgcctggacctgcatgtaaacatcagggcggagcaggaatcggcctccaggagggtaattgcctggcgtactctgtcccaggtagtgggtgaaatgaaagtaaaaagccagctggtccctcatgcagattttaggggacaaagttcagcatagaaaggtcctgttacaaggagagggttgtggcgagcccagggcagcgcgcgtcctccccggcagctgatcctcgccatgggggacggaaaggctgtccggatttccgtggcggaaatgaaaagctactacctgtattctgagtggtgctcctggctgctgtccgtggctgagggtgagtctcctcgtcccctgtgagtccctcgcaggtggtgtgctcggagcagtcgaggcggcctctgggtgaggcagcatggaggtgccctctgtggatgccccgtgctccacagggcagtctgtgtcccctgtggaatttgcagtagctcagggagtggggatgagaagcaaatgagcttttcaccctaaagttatcatctgatcctaatttatgtcacagttaccaaaagcaaataacctccttttgtctggcaagcctgagcctcacaaactgtgcaaacagctgggggctcagcctgcaccaggctgccccgcgtcttgagagctctgatgtcccggggccatggctgcaggtgcaggacagagacaaggccgtgaccgaacactttgctggtccccttgaccatgggacacccggtgacgtgcctgaggatcggccccggcacaccgaagcccggtttatgcagagcttcccacg

SEQ ID NO: 12809 - DNA, 2300 bp, Homo sapiens
actacgtggccttctcccagctgctgggcctgaccttggtggccatgaccggcgcgtggctcgggctgtaccgaggcggcattgcctgggagagcgacctgcagttcaacgcgcaccccctctgcatggtcataggcctgatcttcctgcagggaaatggtgagtcccatgggccgctcctcttttcccgggcttgtgggggtccctgagaggcagtttgcaggggtcttgtcacccctgcggtctcttctggttggacaaatctaagattctagaaaagacagagacagaagctggttcagagcctggggagatggaatccaaacccaggctctgaggttggtgagtggcagctcctctccagcctggtccagcattttcacctcgtttccacacacagcatccaaggcgggcacttcttgcagcagagggaaaggaatgaggctccgagccaggccctgctgcaggggtggtttgaattgagggaaaaaaagtaatcatatgtgagagtttgtatgcgtgcgtgcgtgcgcgcgcatgtgtgttgttggtcttggacttggcagagctagagcgcctccccctggggcaggagcaaggcagtgcttggcctccacctgcctccaggccagggatccaggaagcgggatctgcatccggttgacccgctcttcctagaggtggtcctggtgacagccattcctgagcagcagaaagctaagaggcattcctcacgtgacctggccttgcccacctcttctggacgcgggagatcaggctgggatcacaaggttctgcttgggagccaggcgcctgcttgctaggagtaggaccatctgcccaggcttaggtgggggcctgtgtgaggagccacgtggctaacaggtgaactcagaggctgcttgttgcctcagtgtgaccaacagtggacctcaaacacagcctggaatttgcaggacacctgacaagaaggtgggtggaggggggcgtctgctgggccgggcagctcctttaggtggggacgagggcagaggcgctgccttcactgcctgtcctggtggtggggactgtggtgcagcctccggccctgccctctttgtgcacagctgggggaggttggagggtgggggaggggtgttaaggtgcacacagccctaggtgccctcagagaaggccaggagctgcccagggtccccagggaacctggctttctcctccggttcctgcagctaggctcctgttacaagccgtcagctcacatcacctctccaccaaggtgcctccttgctgctggggcaggaggcctcacgcacaggcggatgcactcacgttccctctctcacctcccacagccctgctggtttaccgtgtcttcaggaacgaagctaaacgcaccaccaaggtcctgcacgggctgctgcacatctttgcgctcgtcatcgccctggttggtgagttcccgggcgcggccttccccgccacctgcctgcctcttcaggtatggcaaacagccgcttcacctgctctgttccctccccagagctgtgatgggcccgcccccaccccaaacatcccctgcagggccactaggtgctggcagccctcgagctgggactaaagcccagaagtcccgctagctggttcccctgggtcatcttacaccttccttttccacatccaaccctgtcctcatatgacctgtctctggcccaggcttggtggcggtgttcgactaccacaggaagaagggctacgctgacctgtacagcctacacagctggtgcgggatccttgtctttgtcctgtactttgtgcaggtgagtccttccaacaccccgggcctggggccacctaccagggaggtgggaggaggaggggagctgggctgaaatgtacctcatggaagggcctgatttctggggtgtgtgcaggtgagagagctgccttcccaggcctgtgcgggtgcaaagctaggattggcggccaagggtgcccagctcccaggcgccccatggctgactcagcacttttggccacaagcccagctttctgagtgtgccaaggcctcaagcgttgggggaccggtcccttgtccctaagcgcttagtgctcctcccaccactgtgctgaggaggaaggaaaccaggcagggctgaggggctcacagtcgccacgtgggcacgtgggtgtgggcctggccgacctcggctgctggggtgtccggccgccctgtcccggaaccgtctcctttcaaatcctagtggctggtgggcttcagcttcttcctgttccccggagct

SEQ ID NO: 12810 - DNA, 2299 bp, Homo sapiens
cacccacgtatcttccagtcttcaaacacggcattgctctgcctcccgtagcgcgcttcgaacctgcctcgcggacacgtgaacagaggctgtccctgggaagataagtgcgctttcccgtaaaatccgggaaatttgccttgaggaaagtttccgttcttgttacttgtcgggtttctcccacttccacttagccatgtttctgcgatctgggtaatccctttcaagcccaggaggaattctcccgggtccataattgagggtcggaagccgtgggggtgagaaacgcattaaatcctcccgaagcccaggaggtgccagagcgggctcagggggccgcctgcggaagctgcggcaggggctgggtccgtagcctctaaccccttggagctccttctcccagaggcccggagccggcagctgtcagcgcagccaggagcgggatcctgggcgcggaggtgggtccgactcgccaggcttgggcattggagacccgcgccgctagcccatggccctctgctcaagccgctgcaacaggaaagcgctcctggatccgaaaccccaaaggaaagcgctgttactctgtgcgtccggctcgcgtggcgtcgcggtttcggagcaccaagcctgcgagccctggccacgatgtggactccgcaaggggctagggacaggcagggggagagcccgggtttgcgcacaccttccagcccctggagggagcctgctcggcttcgaacgccttcgaacttttgaccttcaaaggagtccctggaaaaggtcaggagcgcctgctgcaggcacggttgccgaaggccaggccttcctggcgcaggggagggccaggggagggaagcggatactcagtcgctgtccgacggcgagttttcggagcagcaggctcatgatcccgggccagtggcgagagcagtgacaccgagaacccaaatctccgcgcccccatccgcggcccggtgtcctcccggcccctgctgacctccaggtcacgcaccccactgctccacggctctgcagcctgtggcacacggccgagagtccccacatgatctcgacgccaaggtaaggaattgccctgcgtcctctgagcctgtctctggcctggggggccgggaaagctgcactcctggaagaggtggggttatgtgaccgccgctgcaggggtgcgcggaggactcctgggccgcacacccatttccaggctgcgggagccggacaggggagggcagaggggggacaaaaggactctttaggtccaaaatgaccctgaaggagagtccagaatgcccagtggccgcgtctgcaacggagtcttctttctccaattgccttctgccccatcaccatgggccccacctgcgccacctgcgcccaccctgtgaccctggctcagcgaccttggcccttaatcgcccaacgccgattcctcaaaattccggctgcgctgaatcgggctgcttttgccgccgccccggcagttgggccctgtttccgccggcgccctgggagaggcctcaccactcggctgggctccctggcccctcccttcccctggcctgagcgcccctgcggcctcccgctcctcctgagaaggcgacaatctctttgcaccttagtgtttcgaggacagaaagggcagaagggtcacttcggagccactcgcgccgttttcacgtgtgtgtgtaatggggggaggggggctcccggctttccccttttcagctcttggacctgcaacaccgggagggcgaggacgcgggaccagcgcaccctcggaaggctcgatcctccccggcagggcgcctggccaacgagtcgcgccgcctcctctcggccgcgcctgctggtgaccttcccgagagccacaggggcggcctcggcacccctccttccctcgccctccctgccgcccatcctagctccggggtccggcgaccggcgctcaggagcgggtccccgcggcgcgccgtgtgcactcaccgcgacttccccgaacccgggagcgcgcgggtctctcccgggagagtccctggaggcagcgacgcggaggcgcgcctgtgactccagggccgcggcggggtcggaggcaagattcgccgcccccgcccccgccgcggtccctcccccctcccgctcccccctccgggacccaggcggccagtgctccgcccgaaggcgggtctgccataaacaaacgcggctcggccgcacgtggacagcggaggtgctgcgcctagccacacatcgcgggctccggcgctgcgtctccaggcacagggag

SEQ ID NO: 12811 - DNA, 2299 bp, Homo sapiens
aggaacaacagcatacccaagagggttgccaggcagagttatctaactcagggtccatgtacaaaggcaggggtcaggttgaaggagacagcagcggccacaagtccccctcaaagccagccagcagcaggaagccaccagcccctcgggcttgcagggatgagggggagagcacagtgaccagaggctggccagaacccgggggacaggagaagcctggctgacgggacctgggccttctctagagggccatagccactgccaccaccacccagccactggcaggagagcctgggcctgctctagagggccatagccactgccaccaccacccagccactggcagcagagcttgggcctgctctagagggtcctagccactgctaccaccacccagctggctggcaggagagcctgggcctgctctagaggaccatagctactgccaccaacactcagccggctggcaggagagcctaggcctgtactagaggaccatagctactgccaccaacacttagccagctggcatgagagcctgggcctgctctagagggccatagccgctgccaccacccaccgcccagctgactggcatgagagcttgggcctgctctagagggccatagccactgccaccaccgcccagcgggctgggcctgctctagagggccatagccactgccaccacctcccagctgactggcaggagagctggcctgaacttgcctcttccactctctcatctcctgcctgtgggagctggaccagcctcccaggacatggagcaggacggagaggggatctggggcaaacagaggccatacagccctgggcctagccgctgcctcctgctactgcagaggctgctaaaagctgcacttccccgactcgtttgcagctaaagttccaagctgagggggtcactcaaggtcctgagggtaaagcacctagcccagggctcagcccacactgaatgccccataaatgaaggcccgtccaacagggtctcctccccagggaggctgtcccctgtgtcaacaagagccaaactctgtaaaatatttgaagacatttattctgagccaaatatgagggaccatggcctgtgacacagcccccaggagaccctgagaacatgtgcccaaggtggtcagtgcacagcttgatggtacccattttagggagacatgagacatcaatcaaatatattgaagatatacattggtttagtccagaaaggtgggcagctggaactgggggcttccaggttataggtggatttaaacatcttctggttggcaatcgcttgcaagagttatcaatagaaaggaatgtctgggttatacggggttgtggagaccaaggctttatcatcagatgaagcctccaggtagcaggcttccgagacaatagatggtaaatgtttctcatcagactgaaggcctgtgttgatgttaacgctggctgttccagagttctgaagggaggagggataatgaggctatccaaccctttgctgtcatggcctgaaccagtttttcaggttaacttcggaaagcccttgccaagaggagggttccactcagatggctggggggccttagaatgttacttttggtttataccggaacagcccctgcccctgtcctttgcagcacctgctaatgatctgtcagtgacgctgtgaccaaggctcatcaccctgcgggccgtgggccccagagggcggcacagcttctataggagcacagggcccagggaggtgccctcatccttggctggaaggccgaggcctggaggagtctggagaaagggtctcccttgtctggccttgcactgtgaggtgggggaggtgggagaggcataatctgggtcttgaggacgtttcagccctcagcccggggtggctgagatatggccctgggtaggctctgtcctccagaggtggaaagaaggacaaagggagagggaggtgcaggtcgctcagggaggagactcggacctgcccagccccggggccctcactggctccaggaaacccgctggtgttgactgtgggcagtccagcctctccccatttgaggccatataaagtcacctgaggccctctccaccacagcccaccagtgaccacgaaggctgtgctgcttgccctgttgatggcaggcttggccctgcagccaggtgaggccttggctggcccccagcagggaagggagcaggggtgagccggggaggccagagggatacctgcagggcacacggagaggaggggaaggaaggaggaagggagagg

SEQ ID NO: 12812 - DNA, 2299 bp, Homo sapiens
tctttcatttgtctgttgacccacatgaatgggatccttgtgaccctgggttctgcttgtcagctgtccaagtctgggccgttgttgacctaccaacaatcagtgagggatgtgtttgcttaccaattgagaaataatgtttttcacgttagactctatttgaggggtggggttgctggctgcctgataatcattcctgctttctttgaatgaaatttttgaggttgtaaaagaaggaatttggagtttgcaaagcctaatcataacatgaggcccttgatctaagggctctccaatgggcagtggcaggtgggatcgctggaaggaggaatctaaggacaggaaaccagtgaggaagtaaatgtaacagagaaaatccacatctgggattagacaacagcagtgagagtggagaggaagagatgagtctgagaaacagtgaacaaggaatccacagaacttggtgactaagtggagggacagagaaaagaggagggggaagtcaaaatggctagatggcttctagtctgtgacagaggcagaggaaatgctctgctattcatagaaatggggaagttaggaggtagtgcataaggctgtacagttttagacataggacattggaggagatggaaagtcatcttcaggtggttagaaacccagggccacttttggttggtgttcaggaagggaagtgcagagaggtggaaatctcagccacaggtcaaacacttccctggccccagattaaagaccaatccaattaagcatgagagcacacgagccacacaagtcgcacaagtcagtaacgaaaaggactcccaggtgatcttaagtcacataattaacatattttcagggccctacttgtatgtggccctgaaaacgttgagactaatcagctggaatatatccatttttttttctccttctttttaaaaccttattatagagaattttaaaaatatacaagagtagaaataattctagaacgaactcccatgttttcattacccagcctcaacaacgatcaaatcatagccaaccttgttccatcccaacccttacccacttctccctgcgttattttgaagctaattccagacataaatatttcagtctgaatttctaaaaataaggactctatcctttaaaaataagcacaatgccattatcatgccttaaaaaattaactatggtttcttatatcaaatatcaagtcaggttcaaatttccactaaagttttaagtttccattaaaagcagttgatttgaatcaggattcaaattaggacatcaggttgggattggttggcaggttttaaagtctcttttactctttgggtttctcccctaccctctggagagagctccccacaccgtggctttgctgactgcattccttgggtggactttcacttgtgcctctgtcctcgacatgtcctgtaagctggaagccgggatcagattcagatccatttttattttaagtgttatgcaaaaagacacccagtgaaggtgttagaatgagccatggcagtggatggggttcgcaggacccctgcggaagggggacgtttaaggggcaagcggaaaaggagacacctggaatgggggaggaggagcagcggggcgaggcgggggcggtgccgcgtggtctgcgagcccggatattccctggggagcgcacctgcgacttcacctccagtccctccccggctggggcagcggggcgcgggcgctcgggagaggtggcgctgcctactcggcctcatcttgctgagaatgcgacggggcgacagcttcctgtcttttccagtggcttttggcatccccagaggaaaaaacggggagacccgctttggcctcaggaagcgcagaaacactgtcctggctgcgcgcgcaagggcgagaacctaggggacccgcctaaagcgccgttggggctgagcaccgaactcgcacagctccgggcagcgacccgcgatgcggcatccttccgtccggtcggagccctcctagccctcagcgcgtctattcctagcttcggtccccgcagccatataagcaatgacaccctcgccgactcgcctgccagcttggccgcctccctgcagagggctgacgcttctccagaagttgtaagaaaaggagggaaagcaggccaacctcgaggatctccccagccttggcgttcaggtgctgaggagatcgtcgaggttggcctgcttcccctcactcctcgggccttgctcttcccccaggtgcccactgccctccctgctgtgtaccactttct

SEQ ID NO: 12813 - DNA, 2299 bp, Homo sapiens
gggagtgttagtttgggctatcactcaaggacagagggcaacagaaaggtgtgagggcactctgactgtgccctttctacctataagtgtcctgaatgatttttttcatagccaagatgactctgttggggaaatgtcaccgtgatggttaaccctggggtcttggccggcccaagtcagttcaagttttgttgcttctactctgcaaaaaatacccagtttgccaggtatttctgccccctaaagacatcgggccaggcttcaagacatttctctgcctccatttgtctgtgtgactgtgagcaaattacttaacctctctgaacctcagttttctaatctataaaacgaagatgctgatagcagctgcctccaagggattctgggaggataaaggaaatgctgtatgtgaaacctatctgagagctgggacctgcattcaatatcattctttttttcttctccctgtcactgctcactgttgatttggtttgctctgttcttcctttgataaggctggaaaagaggaacaggagggcatggaagaaagccctcaatcagtgggcagacaggagaaagaagcagagttctctgatccggaaaacacaaggacaaagaaggtaaagtttgtttcagattctgcacttctgccatgagggactgagtcacaggagtcccccttttgcctggtgatgtcctgctggatggaatatggctgagaccccaccattagttccatgaatgaaccagtcctcctagcgctactttggaggagtggctgtgcctggaatcttcggacagtttttattgaagcgatctttacccacatgtctgggctctgctcactctccagcaatttggctgtgttcctacgagaaaacatgtgcccaaaaaaagactcaggcttcagagccaggctcccaaaatagacaagtcccttggcggggatggggcgagaagctgctttgggcactcaagctggggccctgacttcagcaggcccagaccctaggattaacaagccatctactgtgcttgtatagattgttttacttaattaaaatgaaaaaatccagttacagttctcctgggctggagctgccacaacaaaaagaaatatccttggaacagggccatcttcgtgcctttccggtcaggagaggcaggagaaatgagtatcgctggcagggaagctgatctcctaaatctgtctgtggagttgggagtccatgggctgctgcagatgccaaggggaaagttctagaaggggcctagtagaagctttggctgtgggagtgtatgtacccctgctgggagagggtgcttggggggaattttgtgaggggctttgctgcagttacatttagtgatgacccagatgcaagaaagatgctccagtaagtatttagagtttataacttcattattcatgcattcaaaaactgtatattgagcacccattatctactggggcttgaaattctttgcgtcactttaaatatggtggattaagcattaagggcctattccaaactttgagcatcaccctaaagatgagttggtgccgtgggacttgagtggttcacagtaattgtaccaggtagaggtaagaatgctcagattcttcctgatttgagtggtccttatggccaagtcttgtgccttccagttgaatgctctcaaccaccctctgacctccattctgcatttttgtacaggaacaagattgggagagtgaaagtgaggcagagggggagagctggtatcccactaacatggaggagctggtgacagtggacgaggttggggaagaagaagattttatcgtggaaccagacatcccagagctggaagaaattgtgcccattgaccagaaagacaaaatttgcccagaaacatgtctgtgtgtgacaaccaccttagacttagacctggcccaggatttccccaaggaaggagtcaaggccgtagggaatggggctgcagaaatcagcctcaagtcacccagagaactgccctctgcttccacaagctgtcccagtgacatggacgtggaaatgcctggcctaaatctggatgctgagcggaagccagctgaaagtgagacaggcctctccctggaggattcagattgctacgagaaggaggcaaagggagtggagagctcagatgttcatccagcccctacagtccagcaaatgtcttcccctaagccagcagaggagagggcccggcagccaagcccatttgtggatgattgcaagaccagggggacccccgaagatggggcttgtgaagg

SEQ ID NO: 12814 - DNA, 2298 bp, Homo sapiens
gctgacactcagtattaaccaacacaccatttttattagtcatgcttgagactaaattaaacattagtgttcttttttttttttttgaggagtcttactctgtcaccaggctggagtgcagtggcgcaatctcggctctctgcaacctccatctccttggttcaagcaattctcctgcctcagcctcctgagtagctgggattacaggaccttagataaacttactatcactttatagcagtagagaaagcacggaaattggcactgtatttgttttctattgcttctataacaaattaccacaaacttggtgacataaaacaacacaaatttattgcttaaagttctgtaggtcacaggtctgacaagtgtctcattgggctaaaatcaagttgtcagcagggctgtgttccttctgggggccttatggaagaatctgtttccatgcctttcccagcttctagaagcctccagattcctaggctcctgggccctttcctccatcttcaaagccagcaagggcagattgaggtcttttcaagtcacatcactctgacctcttctgcctccattttccacttttttttttttttttttgagaacgagtctctctctgttgcccaggctggagtgcagtggcgtggtatcagctcactgcaacctccgcttcccgggttccagcaattctcatgcctaagcctccagagtagctgggactacaggcacccaccaccacgccagactaattttttgtattttagtagcgacagggtttcaccttgttggccaggctggtcttgaactcttgacctcaggtgatccacccaccttggcctcccaaagtgctggaattaaggcctgagccaccgtgcccagcccattttctacttttaaggaccttatgacaacactgggcccacccaactaatccaggataatatccctaatttaatgtcagctgataagcaaccttaatttcatctgtaacctcaattcccctttgccatgtaacctaacctattcagtctccaggaattgggaagtggacatcattggcagggggcattattctgcttgttataggcatacttgcccacaagtctaaatcgagagtttgcatataggaggtaggaggtgtgacaataattggataaaggcttttctggaatgacaaaattctcttcaaatacagggaggccctgcgacatgatatctggcaaatcacttgagtcttagtatccaaacttccgctaaaatggaaattaccatcctttgcttggcatgttaaatgaaatacttatgtaaacggacttagattagaggcctacaaataggactcaagttcttgatgaatcttgatgaggagggtgggcgaagtactctaaatgaaaatgagatagattgcgagatttccggagaggagtgagtgacaagcgcctacccgtgcatgaagctggaggtagaaaattccagcaaaaggaattttcaagtttcactgaagcttttgaatcaaggcttgaaagcccagggttaaaaaaaaggcagtgaagaagctcattaagacaaccccccgccaggtagcagatagcacctgaaatgcagtgggaaatttgtgaggtcttcataggcaaggattaaattttacatctccatcttaagatgtgtcatagttgttcaattacttagtgaccaaaaaagtgaattaaagatgttgtcaagattaaaaaaacaaaaaccaatgcaggttccaccgagatttgaactcggatcgctggattcagagtccagagtgctaaccattacaccatggaaccgccacgcatgtgtagctgccttcggctgtctaatcctcagagaaccccgcccccatccacaaacccaccactcacaggcggtcccgcctggttccagcgagccgcttccggcacggtagctcgagaaatgagcaagcggccactaagactatggtagctaggagttccaggactcagtttcccctttgagcctcctttagcgactaaagcttgaagccccacgcatctcgactctcgcgcacaccgcccttgttgggctcaggggcggggcgccgcccccggaagtacttccccttaaaggctggggcctgccggaaatggcgcagcggcagggaggggctcttcacccagtccggcagttgaagctcggcgctcgggttacccctgcagcgacgccccctggtcccacagataccactgctgctcccgccctttcgctcctcggccgcgcaatgggcacccgcgacgacgagtacgactacct

SEQ ID NO: 12815 - DNA, 2297 bp, Homo sapiens
ttcatctttccacagagctttccattaaacagaggcaaaattaaaccatgtcctttttttccatggcactctgaacccttctcatcatgtgatctattagaattacttatctatgtatctggcccacaccactgagctcctggtgaacctatactgctccccttcataaaatataaagcaggtggctcacacaaaatacactctcaacaaatgtggaatagaaggcatgattcatgattatttcattctactaaatgcatgatattatttggactacgcactgtgatataccattaaaaataagtgatttttaaaaaaaaatttccagaattaggacagatgcactgtgactcacgttattattattattattattattattattattattattattattttgagtcggagtcttgctctatcacccatgatggagtacagtggcatgaccttggctcactgcaacgtctgcctcccgggttcaagggagtctcctgcctcagcccacccgagtagctgggactacaggcgcgcgccatcacgcccagctaatttcctttgtatttttagtaaagatggggttttgccatcttggccaggctgctctcgaactcctgacctcaggtgatccacccgcctcggcttcccaaagtgctgggattacaggcatgagccactgcgcctggcctgacctacattcttaaaagggctgtgttactgaaacaatcaggaaagaatcatatctccaggtgaaggaaaatgaacaatgctttttctcttcctcaagtcaagaaaaatccagttctttagttgacagtacatccaagttagtcaaattaagtagcttcctgtctccgcttcattttatctacttgtcatgattaaatatcctactaggttgtaagtgggccctcaacgctgacctttttatcttgggatttgagaggcacagtctagagcactactcttcacctaaatgccagtatgccaccagtagaaattatcctttaggctaaatattgttcttcccagaaaccctcttttcaaggatcagtttaaacctaaattcatcagagaggaaaacagcagatttcagagtcagatgaagaattcatatccacctggctttgaacattatcggctgtgagatggtgtaggtaaaattttaagtgcataatttggcaataataaatcatcaataaatattaatgttgatgaggcccctgggccacataaagaaatagggagtgaggggatttgaaattctggccacttcacagaaatgggtgggaaggggctcttgattgagatagaagcccatcctacatgaagcaattcctcattgagttctctcgtcctttatccttgttggaaacatcaggcaaagtcactcttggtcttaaagtacttttacatctaaatacggaactcttctatttaatccctgtctgttgtagatgttaagtatacaaagaggttgtcagagtttgaaacatctggacttctgtcaggtactagctccggaactccagtcctgctcgccctcaaaaacggcttgcagctagaggtttaagttccacttcctctcagcgaatccttacgcacgagggaggcggggcgtgtgtcctccgcgcgtggttttcgggtagcaccttctggggcgccgcctgcctccacccacggccgggccttgacgtcatgggctgcggccccctcccggctgagcctataaagcggcaggtgcgcgccgccctacagacgttcgcacacctgggtgccagcgccccagaggtcccgggacagcccgaggcgccgcgcccgccgccccgagctccccaagccttcgagagcggcgcacactcccggtctccactcgctcttccaacacccgctcgttttggcggcagctcgtgtcccagagaccgagttgccccagagaccgagacgccgccgctgcgaaggaccaatgagagccccgctgctaccgccggcgccggtggtgctgtcgctcttgatactcggctcaggtgaggattcaccggcgctgaactgctgggctctcctcccatggcaggttttgcctcttgagtttggctcttgcttctctaaaaatcgccctttagttcccccgaccctgcgccgcaggaggtgatcactgtagctccctccctaggaggaaaagagaagggcagatgtctcaaacgtccaggacaaggtgtcccagagaatcgctgtactttttctttagttcagctgagaagacgggagagatcatttgaacctaacccttcgtttca

SEQ ID NO: 12816 - DNA, 2295 bp, Homo sapiens
caccacagctggctaattttgtatttttataaaaatactagagaaggggtttcaccattttggccaggctggtctcgaactcctgacctcaggtgatccacccaccttggcctcccaaagtgctgggattacaggcctgagccaccgtgcccagctattatctgattctttatagaaaatgtttgtcagctctgtcctttttccatttccttctcattcctctttttccaggaaggagttgagcttcagcggaagaagtttataaaacctgcctgaatgccctaaaaactccccattctcttcatgtgctcctaaatccaaaatgtctttcttcagaaggctgaatcagatgtgaaggctctcttcgacactctagaccagtgctgcccaatagaacgttgtgcagtgatgggaatgttctagaattgctgctgttcagtgtggtagccactagccacatgagggtattgtgcatttgaaaggtggccagtgtgactgaggaactgaattttcaatttcatttaattttaattaacttaaatagccacatctgtctagaagctagtttattagacaacattacttgttcagagaacctgaacaagtgtcagactaattcaagagggaagtaagagaaattttggtggtcagcaatctgagttcctacagagaaccctgatttttatactgactagtttttaagtttgatttgcttattttgattctaatcagcttagcaaacatttattgagtacctactatgttccagacattcgcccaacatttacatattaatggtagcataggttcctgatgtcaagagctctgagtctagaagtgagataacaaattaggcacttattctccaaagcaggagtagtgtttcctcaagtgccacagcttttcttgttcttctctctcttttttgtttttttttgtagagccggggtctttatctcatgctcaggctggagcgcagtggctccttctaggctcactgcatgcaatctcaacatctggggctcaagctgtcctcccactcaggctcccaagaagctgggaccacaggtgcgtaccaccacacccggctaattttgtttatgttttgtagagacaagatttcacatgttgtcaagactggcctcaaactcctgggctcaagcaatgttcctgccttggccttccaaagtgctgggattataggcacaaaccactgcacccagcctagtcccacaactttcttctcagtggctgtactgtctcttcacaatggcggtcttaccccttgcttgaaccttcactttctcaattctggaaacttctacattgctcagtgcttcttccacatcttgtagattccttatgcttggcgttggaaacttcttcctctaacagtggagatttttcttcagagaaccactccacctgcctgttactggctgatacatctctgaccaaaacaactgtatacaggactaaacctcagttcttcagggtcagggtaggaagtcagaggtaagagatccataaatctgtactgcccccaagccacaagctgtctctttggattagcatagagtagcaaatggccatggggcatgtccgttgggtcacctgagtcttgtggaactggattagtgacataactgtgttaggccctgctgcagacagtgatctctctggaaggacatgaggtggtgtgagaagtcacacaactcattgtgagaccacaggggcagataacgcctcatctgccttcatcacaatgcttgaaccttaatcctttgatgatagctttgccacataacttttttaaatctctggacatttttccaaactctgttgaatttcattttgctgacttcatctcatcctgtgtgttccaggtactggtgtctggtaattctattatagcaaactttctcttgagggttttggggaaaagaatgagacattcttcatattgactctgtttagagggagatagggcaggagtccaggagtgcaaatggatagacagacacaagagaatgctttgcctttgagcagatcccagagcgtcatgggcatccgttggggatggagcttgaccagaagcctggtaaagacttatcccctccctaacccctacccagggtcactgcagagtgaaattctggcccatggtctgtctcccacgtggtcagcatggcctctgtggcagactgctctggctttgcaggtgcaagatttcccgtgaggccatgctggagagcatcaccagaaacaattaaaaacaccctcagcctattgtca

SEQ ID NO: 12817 - DNA, 2295 bp, Homo sapiens
cactgatgtcagctctgctggcatggatgatgggggtggctggcgagggtgtcgcgtgggcacgtgggagcccgaggctggcggtgggctgtgctccaggccttgcccggttgaccgtgtcttcggggtgagtgacgctccgcagacgccgcatggaatgcggggccggctccactccttccgtaatgtggttttttatagtcgggggactcattgtcccgtggccactgccagctgtctgtaagctcaggattagagagcctggcctttcgtgagagctggggctgtgccggctgagcccttcacagggaggggtggaccacggggacagggagcgactgcctggcactgagtgagccagccagcagacagcatgacggccttctccttgcctgcccccagggcctggtgcaggctctcttctgcccaccctacccagcttgggggccccaccccatcacggccctcatgagcctctcggggcatcctcctggatggcatcgcagcgggcattggcctcccctccatgcccacctccaattctgatcaggagcacccctcacccacagtaggactggaagctctatcgggccagaaggtgcacagggggccaggggacttggacttgagtccacctcgtggctgtgtgatggtggacaggtggcgtgccttctctgggcctcagtgtcctttttgctaaagtaggaatggcgctgtcccatgacccggtttggggacactacgtggaaggaagcatccacagcacaaggtgccgctcgccctcgtgtgcccggggtggctgccaaggggccggcagcgtcgccacgtgtcggggctggcctgagttccgtgtccctggaatctacagcctgtgttccgtgaaggcagagcatgactgggcagcaggcagcgggggttctaatgccgagatttcccttccccccaactcctgcccaccccggcgccttccctcctgcgtacctttctttgggcaatgggcagaggccccggagcgggcgggattcctgtgaggtgacgccagccggagtgtccagccgggtgcagccagcccagtggcccattcacgcggccgccagggcttcattcacccctggccgggagggcagcgcccccgtgactcgcagctggggcttctccacgggtggcggctgcatcgctctgccagtgacgctgggctggtccctgggggccctcctgctgctgtgggggtgcaggggtggatgctggccccaggatgctgcacacggcctcagggcagcacccacacactggcagctccagcttcccctgaaagatgaccgaggaggtggggaggacgcggtgctggccagcagtgacggctgcagcatgtgtgggcaggtgccgtgccacaccttttacaaacatctgaatgcagccctcccaacagcccgggggaaggaagtgtggtcacatggcagccttcctgggatgtgaccccagctccaggtggcacagctcccttctcctgtggccttggagccctgaggggaccctacttgatgtctctggggtctcctggctgcttcatttgccctcaagacggctgtgggggcagggtcgctgggaccttggggcagaggagggactgatcaagtgcctgctgggtggcagagcagccacatccccccatccccccaagcaagcccggaaggcaggtatgtgggcgggggcacccatctgtccagggcagggcaccccctccctcctccccatgccctgtcggctgcaggacctaggatgggcggggcagcactcaccccagcgcccaagtttgaagggtgcggcggggtccctggggagtccagaggctctggggacccagcttcacagagccaggtggggtgtcggctctgggcacccggattcacggggccaggcggggtgtcggctctgggcatctgacttcgtggggccaggcagggtgtcattgtcggctcttggtggagtttgctgcggtttcctgtgttcctcctcttcagggtccccagcccgccctcgggccagactgacctgtctctgtccttcctctgcaggggctggcgtcttcttcctgtcctcggccgagggggagcagatcagcttcctgttcgactgcatcgtccgaggcatctcccccaccaagggcccctttgggctgcggccggttctaccaggtgcgtgtgggagcctggccggccggggagggtgcgctcggcaggctgtgcgacgtcccggggcggggggccacagtgatttgtcagccccagttagatg

SEQ ID NO: 12818 - DNA, 2295 bp, Homo sapiens
tctattaaaaatcaaaggccgggcgcggtggctcacgcctgtaatcccagcactttgggaggccgaggcgggcggatcacgaggtcaggagatcgagaccatcccggctaaaacggtgaaaccccgtctctactaaaaatacaaaaaattagccgggcgtagtggcgggcgcctgtagtcccagctacttgggaggctgaggcaggagaatggcgtgaacccgggaggcggagcttgcagtgagccgagatcccgccactgcactccagcctgggcgacagagcgagactccgtctcaaaaaaaaaaaaaaaaaaaaaaaaatcaaaaaaattagctgggcatggcagcgcgagcctgtagtcccaactactcggaaggctgaggtgggaggatcccttgagatggggaaatcaaggctgcagtgagccatgatagttccactgcactccagcctgggtgacagaaggagaacctgtctcaaaaacaaacaaaataaaacaaacaggctgggcacggtggctcacgcctgtaatcctagcactttgggaagctgaggcaggcagatcacctgaggtcaggagtttgagaccagcctggccaacatggtgaaaccccgtttctactaaaaatacaaaaattagcagggcatggcggcggacagctgtaatcccagctactcgggaggctgaggcaggagaatcgcttgaacccgggaggcggaggttgcagtgagccgagatcgcgcccctgcactccaacctggtgacagagcgagactccgtcgaaagaaggaaaggaaagggaaagggaaaggaaagggaaagggaaaggaaaggaagagagagagagagagaaagaaaagaaaagaaaaaagaaaagaaagaaagaaagaaagaaagaaagaaagaaagaaagaaagaaagaaaacaaacaaaaacaaatagggattaataaataggcagaagcaggcataatccggggcaggggaagcctcggggccacgcccgagaggcatttgtattttactttcagcagttcagagcccatgatagccaggttacccacttgtggacttccttgaccacttaattgagtcaatctaaccctcaccttctctctcctctcactccatttagcgggtcacgtagccactagggcttccttagcctatcaggccacctggggactgagtcattcagtcagtcacctatctggtggtcacatctgcccctgggctcatccttttactgggccacctcggcccatcgggacctgtcagtccttgacctccctcaggcccctaggctggccaggtcgcctcagtgccacgcctccctggcccgcgattcagcctgcacgttacgctttgttcccagaagcaggttttcgaaacgcggttccctctcggctccagctgttttcctgccagcgctgggagacccggcagccgcagcgcccccagcggcgcgcagcggcccaggaagagagtgcctaccgccggcgcctcttcagcctcctcctggaacgcgggagcgggcgcgaccagcgcccaccctgatcgtcgcgacggtgctcctgattggctgcgctgtgtgacgtaacgggagggccccggcggccgccgggagccggggcccagcgcgtgcgcagacggagcgcgctgagcggagggggaggtggctgccgcttctcccgcgtccgccattttgttgctgtggctattgggaacaagctgggcaaaagcaccccggaggcgcgacgctccttcgagttcggtgcctcgtgtgacggcgggggtcggtgaagacccgtcgagctgcggcgccggcgcgttccaggccgggagtcactggaggcacccctgggacgccgagcagcccgagaaccccggggtggcctccgctgcggctcgggtttgcctgccccgaccccccggctctgccgtgcattcccgggcggctctctccgtgtggcggccccggagcaggcgggcggcgtcggaggatgctgcgggcccggagccgagaggaaagtgctggcccagccctctgagcgctcctcgaggtgtgcgagaggcccttcctcggccccaaagccgtctgccgggctaaggcgtgcagagcaggcgaggacagccgccgcccctaccgccgcagagtccccggtccaacaccatgtcctccgccaggttcgactcctcggaccgctccgcctggtatatggggccggtgtctcgccaggaggcgcagacccggctccagggccagcgccacggtatgttcctcgtccgcgat

SEQ ID NO: 12819 - DNA, 2294 bp, Homo sapiens
tctccattgtaaaactgacagtcaaattttagtaactcctgatcttttttgtttcttctgttctttttagactcctcatccagcattttggtcctgtttgctggctctctcttttaataggtctaccctagcttctcttttcagttgttatttgacgttactagtcttgctgtcaatgcatctcagtccttggattccagattgttattctatatccatctgctctgtcctgattgtcagtgaaaagtgttgctcttcgcctggtgggacatcaaaactctgacaatctttggctcttcattcagagatgggtggtgcgtgcaaaagggtacaggtttcttggttatacatttaggataccttacaaattttccaaagactaacattaacctctggttaggggtaaacgacaaagtggcacaacgaagaagaaggagaaggagaagagaatttcagtagttagtattttcagttctggacctggacctaaggaaaaacactgccaagttagtatatcaatacacacaagtatctcctgaactatttttttgtttgtttgtttttggagggaaagggagcttggcaattgcttgtaggtactgatattaaaatgttgcaaatacatggaggttccttggtgctcgcaaaataaccatgacatgtaaaacaagcaaagaactacctagtttactaaagtcttaaaccctaactcatagatgtcctagtataaaatagcactatggatgctaaaaccaatgtcttagagtagtcaaatactaaagatacacttgttgatactatactaaactgtattttaaaccttatttttaggtcacgcatagcactaataaaacagtgaataagcaccataagagcatgtcaaaatgtaggaggaaggccacaactaaacttcatagtaaaacctaccaccatgtgattaaacacgacaccaaaaagtttttagctagttttctatttatatccctagatatctttgggatagggccaaagaaatgagttcatagaaaggtataaaggccattttaagtcctggttttgggtgtgtcaatgtttgttgcagcagcagaaggaaggctgaaacagaaagttgtgtcataaatggaacaaatactgtttaacaatttttttttgtcttaaaaacagcaaaacccaccatcttcctggagtctgcgttgttctcttccagaatagatgttgagcttttaaacaaacctgcagtagaagcaagccctctccaggaaatcccaatctctttccaaacagggacagcaaaggttctctctgttgtggctgtttttccctctcttctgggaattggtttgccttctgagagcatcccaggaaggggaggtgcgccccaaattggcgaggctctgccaaataccaaaggctcttctttggaagaagactcctcctttggacgtgaggcgcccctaccagagcgcccgcgtacagaaacggaaaccactagctgcgctgaagtgagtcaagtgatgaaatcaagactacacgggaaggaagctcacgaaacctaactggtgacagaagctgctgaaccctgcccgaagaaaccacatgagccagcagttgctgccctcccgaagtggtcctcggaggcagcgcaccccttcattttggcgaaccgaggaggaagggaggaaccgtgtgggggaaatctagaacttctggttccccaaggacccagcagactgtgttctggctacaaggtgatcactgccaccaggtcagtgcaggattcctccaatgtagatgggccgggagccacaacttgcgcggagcagcagcctcgccgaccactcagagagaagccgcgcgacagccaggcttggcccggacggcgcccccaccctgcgcgcgcgatccaaggttctcacctggagcgctcaggtagggctggggcggggcgggaggctggcgcgcaggcgcggaagtggggcctcgcccctgccgacgtcgcaggctggagctcacctgggagactccaagtggaagccgagcctcggttctgcctctccaggcaacgcgggaggcccagcgggaaggcaggaggcggcggcggaggaggagctctactgagccgcaactgtggcgacagcaaccggagtcgcagccgccgccacctgcacctggcgcctagcccacgtccagcgcctgcccggccgccgcttcccgccaccctgccctgcccacccgccaggtaagccggcggcaggcggagggagacgcggtacccctgggctgcgttagagcag

SEQ ID NO: 12820 - DNA, 2293 bp, Homo sapiens
gctccagatcctgaacaactacctccagtttgaggtgtcccacggcccctccgatgtggagtccgtgatgctgtccgggttgcgggtgaccgacggggagtggcaccacctgctgatcgagctgaagaatgttaaggaggacagtgagatgaagcacctggtcaccatgaccttggactatgggatggaccaggtgagctggcacctgcacctcctctggggatagacccttcctccggcccagggaaaaacagaatgaccccttgacgtgccaggacccaccagagaccttgtggatttggggaggcactttctgggtccccgcaggtgggcttctgttctgccctgtactgaggtcactggcatcttcctcacctccttcatccggatgccccgcccccggcagtcagcagctgacttcctccagctgcatttctcatcatgatgctgttggtgccttcagcagtggtttcttttagcaaagccatcttgagcaacacctgcaggctcagcaccatgtctttagggtactgaagtagcaatgctggggcccgtgccctcagagcatggatggggagcaaaactgggagagcagtgagacccaggtcctggacaggcctgtgagacaccagggagccacacatgtcccaggcaggcaggtggtggtatcccagacaatgttcggaacacttaaccaaactaggtttccacagtttgcaggcaggtaacccaagatgttgtctgtgaaatgcccacacacttaaggggcgacctgggatctccaagagctcttggagccaaggctcatcttacaacacagacctgggagtaaataggtgtgttccaggcacctgcctttctgggactggatctcagccgagaccctcttgggttcccacagtgttaatgagtgagcggatttccgttcactgcagtcttcctgactcgccaagctctctgtcacagcgtggctggtttagtgttgtgcccttgacggaggcgggacagttgcccacgttgaccccactggccgcctcagctaggctggggcatggacacccatcctctggcctggtcccctcgccctggtcatcacagccagcctcgctgtccagctgggcccagctctctctttggaggcccagatgtcctcaggctctgcggagtttgttgaagtgactgtttagacttccagtgtatccttcccatctgagagacgtttctaggatggtggatgcagcccccagatccccggcccctctctccgcacagaacaaggcagatatcgggggcatgcttcccgggctgacggtaaggagcgtggtggtcggaggcgcctctgaagacaaggtctccgtgcgccgtggattccgaggctgcatgcaggtgcgtgggggttgtggggggcggggggaggcctgcccctcacaggcagctccgaggctggcagcaccataggtggttccgttggtcaacctgttagctttcaacgagtgaagaatttgtctgacaggcatccccactttaacagctcctgtttcctcttcagacccattctcccctgcggttccccttggcatccgggccgtccctggcccccacagctccccaccgccatgccagccacctgcccctctgcctttgtgaagtgtcctgaatcgagccccttgccgccacccccacccagtccaaccacagacgtcacccaagtgggccccgtgcctgtcccctggagccaggggttccagctacggccgagggagctgctctgagtcgttcagctctcagccccctcggcagggacatccactcctcacgcccccaccgcgcaccccaggagctcaggctggcgtgccctctgagctcctcacccagccctccactgcactccggccagcaggccgtggggcaagaggaacaaccctgcccgccccagctctgtagataaatgaggcatcacagatgaatgcctcgcaagggaccagagaggtctcagggttcccttaacccctacatacctttccgggctcctgtagccccagtgccgtttacttaatgcagggagtgaggatgggggggacgcccaccaacgtcgccaccctgaacatgaacaacgcactcaaggtcagggtgaaggacggctgtgatgtggacgacccctgtacctcgagcccctgtccccccaatagccgctgccacgacgcctgggaggactacagctgcgtctgtgacaaaggtgggaccgccctcccggggcccttcagtgacagggaggtctcttatggctgaaaca

SEQ ID NO: 12821 - DNA, 2289 bp, Homo sapiens
gcaatatgagtctcaaaggccaaactccggccagtcaggagccggaaggctgagcccggctgacctgactttgagcttccccggagttatctcgcataggcgctcgctctgtccaagggcacgcgacgccagcgggcagccggtctccgtgaagaatggcctctaaacaacttattttacctcgttgtaaagagagggataaaatgggctttccctctccacggatgcccagccttctgggcaggcgcatggccgggcggcgcccagcccgcagccccgatccggacaccccactgcatccctcccttcccggtcccttccccgcacgggcgcccgagagacggacaaagagttggggccaagtttgagcgccgggcacggccaggctcagggaaggaaggtccccggcagacacctgggtaccagagttggtgcgaggaggaaaagctgggaggcgaattcacaatcctgggggtggagggcaggcaggggaggggaatcaggccaatcccagccgagtgagcccccagcgagctggggctccggatgggaggcctgtctcgcgctccaaagaaaagcaaaccgccctcccaggtccgcccggattgccgaagcccctctggaaaaactccttcccctcttacaccaaactttgcgccgggcctcgttccctcccgggtaggcagcggcgcaggaagggttaagccagcccgtcccagctgacagtcagctgattgggccctgattgacagctccgaaaagtttccttgtttctatactattatgctaatcgcggccgctctcgccgcctcccattggcccggagtgccagtcaatttctcatttggacctgacgtcacgagtgctataaaactcagcaattgctttaaactcttcttgctggatcagaggctttaaaatcttttttcatcttctagctgtagctcgggctgcttgtcggcttggcctccccctcccccctttgctctctgcctcgtctttccccaggacttcgctattttgcttttttaaaaaaaggcaagaaagaactaaactcccccctccctctcctccagtcgggctgcacctctgccttgcactttgcacagaggtagagagcgcgcgagggagagagaggaaagaaaaaaaataataaagagagccaagcagaagaggaggcgagaagcatgaagtgttaactcccccgtgccaaggcccgcgccgcccggacagacgcccgccgcgcctccagccccgagcggacgccgcgcgcgccctgcctgcagcccgggccggcgaggcgagcccttccttatgcaaagcgcgcagcggagcggcgagcgggggacgccgcgcaccgggccgggctcctccagcttcgccgccgcagccaccaccgccgccaccgcagctcgcggaggatcttcccgagcctgaagccgccggctcggcgcgcaaggaggcgagcgagcaaggaggggccggggcgagcgagggagcacattggcgtgagcaggggggagggagggcgggcgcggggggcgcgggcagggcgggggggtgtgtgtgtgagcgcgctcggaggtttcgggccagccaccgccgcgcaagctagaagcgccccagcccggcaagctggctcacccgctggccacccagcacagcccgctggcccctctcctgcagcccatctggcggagcggcggcggcggcggcggcggcggcaggagaatggcatcagaactggcaatgagcaactccgacctgcccaccagtcccctggccatggaatatgttaatgacttcgatctgatgaagtttgaagtgaaaaaggaaccggtggagaccgaccgcatcatcagccagtgcggccgtctcatcgccgggggctcgctgtcctccacccccatgagcacgccgtgcagctcggtgcccccttcccccagcttctcggcgcccagcccgggctcgggcagcgagcagaaggcgcacctggaagactactactggatgaccggctacccgcagcagctgaaccccgaggcgctgggcttcagccccgaggacgcggtcgaggcgctcatcagcaacagccaccagctccagggcggcttcgatggctacgcgcgcggggcgcagcagctggccgcggcggccggggccggtgccggcgcctccttgggcggcagcggcgaggagatgggccccgccgccgccgtggtgtccgccgtgatcgccgcggccgccgcgcagagcggcgcgggcccgcactaccaccaccaccaccac

SEQ ID NO: 12822 - DNA, 2287 bp, Homo sapiens
tcactactccaccgtctaggtccttgatttaaatgatttcatgacacaagtaggaacagaccctttgggcaactcagcagctaagccaacatcaccttaagcaaaatgttagacatgaaaatgtcacattacatggaaaacagcgttaagggaccacaactacaataaggaaaagactgtggttttttttctctcttatattgtttgtgtaactaggatgattcctgtacataatttattcgtatgcatatgtatccatatattatatataacatttattgagatccagccatgtgccaggcactgctctaaaagcattatgtgtactagctcacttaatcctcatgatagctccatgagatagatacttttatgatccccaaattatggacaaggtgctgcagcacagaagttaagccgctgcccaaggacacacagctggtaagtgttgcaggtgggatttggccctggaagtctggcttttgtatcttatgcatcagttagcagactattgcttattttgatcaagtcttttctatttctaatatgcaattaacatataaacaccattagttccattgaaaaacccactgcagagatttcagaaggggctgcaaacccctttgagcaggctcccatcaggctacctttcctgggtggtcagcagctgctttgctcctctgtgaactttttccttaatagcaaagtggcctcaagaagacctctggcctcaagaagctccccactcttgtactggcaattggcaatacagtgtacaaatgtacactgcttcaactggtcctagaaaacctgggaaccgatgcatccccacaaggaaatattagagttggggaccaggtgaaatcacagtcataccttcaggaccttccatatatacttgccttattcagcacgtactcagtactaagaacttaagttatttacacatattagctcactttagcctagaagaagcctacaagaagatattaatgttcatcattaagaacaatgtatataaaaatgtaaactgcaaaatgtgttaaaaatcttaagctttaataaactggagttaaaagagaaattgaattaaaccacactatccttactcaagttcaaaaccatatatattttcaaaaattattttctgtagagatgtggcctcactatgttgtccaggctagtttggaactcctgggctcaagcaattttcccatcccagcctcccaaagtgctgggattacaggcacaagccacctcagccagtccaaaaatatttttcttaaatcatactctcacaaaaacgttttgtctcactccacttccaaagtgactcatggaagccgtgaaaaccagaaccaataatagtaatgggattaaaaataaatagaatttattaaatatctactgtgtcccaaagtggcatgtgtttcttttcttcttttttttttttttttttttttttttgtagaaatggggtctcactatctttgcccaggctggtctggaactcttagtctcaagcaagcctcccgcctcagtctcccaatgcactgggattacaggcatgtgctgcccaacggtgtttcctggactcaaacttgctttgatgtctcaggtctgcatctacaaactactggatgttgagaaagtcctgtaactttcccatgcctcagtttcctcatctgtaagtgggatgacaaagatacctatcttgtaggcttgttgtgaggatgaattgagttagcttatgtaaaacgctcagaaaaacacatagcatgttgtaagaagacagaagtgcctgcggctatcatcaaaatctcacaaccttggtaatacacatttttacatctgaggaaaacatctgaggcttagacctaaacttgccgcaggtaactcattagaatgtggctggggcgggggacagtggtgaaggttccaacccaggtgtggcagattccagagcctgcggtctgaaccagcccctggtgacctttaccccgagagcggaagaaaggcaaacaggcggaagcccacagccgaggccatcgcgctgcgcatgatccgtggcaaccgtccttccttgacctttgcccactggaaaagccaatcccaagtcagcctggggtaaaggggcggggccttgtggttggcatagcaacagacatgggtcaaactcacctgggggttagggcggggttgtttgtcactaaggaatcattgctgaatgacactacagtggagaaccagagccccgggcttttctaaacaaacagccctggtcact

SEQ ID NO: 12823 - DNA, 2287 bp, Homo sapiens
cttcaacagcattaggaaggcagcatttgggggcctgtggcctgtgccctgagtttgttagaaggcagcccagctttttctcagtcacctgccttcaccagacagcatcacctgtggcccaactggacctatttcttcttggggacatctcataggtatccccactaacacctcctgtacacaatgtatatggattttaattgcgtcccccagcaaattcatgtctacccagagcctcagaatgtgatcttgtttgaaaatagggtctctgcagatatagttaagatgaggttctttggcatcagggaaggccctactccaatgactggtgtccatgtaagaagagaaaataggaacatagactgctatggtgggaaaattcccaacaaatttcatatgttggaaacttaacctcaaaattcatatgttgattggaagttgagcccttgggaggtaattagggttaggcaaggtcatcagggcggggtcccatgttgaaactggaaactttataagagaagaaagacctgagctggcaccacgctcttgccctctcaccatgtgatgccctccacgttatgatgtagcaagaaagccctcaccagatgctggcaccttaatattggacttccagcctctagagctttaagaaatcaatttctttgtgtgtgtgtgtgtgtgtgtgtgtgtgtgtgtgtgttttggtgtttttttaaatttgtttgtttgttttatttttgaggcagggtctcactctggttgcccaggctggagtgcagtggtgcaatcatggctcactacagtctcaacctcccaggcttgagtgatcatcccacctcagcctcccaagtggctgggaccacaggtgcacaccacggcgtggcacccagctaattctgttttattttttgaagagacaaagtcttactatgttgcccaggatggtcttgaactcctacgctcaagcaatcctcccaccttggcttcccaaagtgctgggattaaaggcatgagcctccgcacccgacctattttcgttatgaattacccagtctgaggtattcagtgatagcaacagaaaatgtactaaggcatagacacagaggaaagacagccacgtgaggacagaggcagaggctggagagatgcacatgcaagccaaggaacacccaggatggccagtgacccccagcagctgggagagaagcaaagaaagagtctgcccacagcccccagagggagtgtggccctgcgcacatcttcatttccaacttctggcctccagagccgtgggagaatacatttctgttgtttgaagctatccagtttgtggaactttgttacagcagccctggggaatgaatacatggtcttagaggggagacttttggtattcagaaaaaggccttgtcctgtgtgaatttcccatctctttatggctgcctgaaacccccccgccccccttaacatgcttctttcctttagaagaagggacagatccaggcttctattcatgtgtccctggaaagtcacattcctcggttgcctctatcatgtcttcagtgcaactgcttctatagaccatgtggcgtggtctcagtgttggaaatgtctccttccttcccccggggtgggctccctccttgggtctccagcctccatgcaggacctgggggagggggactgagtgggtgagatccctcccagggcagcattcggcagaccgcaagtcaaggttgcagagtgtatgcagccaggggtagcagccacttcaggatctgggtctggatttgtgctgagaaccactatgaccttttaaagccagtgaggaggttttctgggggcccagaagccctgagcccattggccagacctcctgggagaagcggagcggatttgcatcaaaaagaacactggcttcattgaaattctcctcatcttgagagaaacaaaaccacaaagaaaaggaaagttttaattctgagaaacttcactgaggagcaattttttttgagcttctaaaaatagagaggaaatgagcctctttgggtcactctagttgccgcctcccctgccccatgcccacccccactgctcactcaaggctagcctctctcagtgggtgactgagctgtcttcagtggaagcccgaggcagatgccacgcaattctggagctggatacggctgcccacacggggaccccagcatgctggacagcagagagaccccacaggagagccggcaggacatgattgtgaggaccacccaagaaaaattgaaaacca

SEQ ID NO: 12824 - DNA, 2286 bp, Homo sapiens
ataagattttctcccacctccccatagtcagatcctgctgtacttctttgttgaatctgatgtatatatgtttcttacactggtggaaaagaggccttatctttacactaagaccatgacctttgctttattcagtggatgttatttaatgtgacttgcagaaaggtcatttactgcccatttgcaggtcttttatatggtcaggtccacttcaaaggcaccctacaaaatattccatttctgtttgtgtttatcagtgctatcagcttttactttatcataagcaaaaagctgcctaaagaagtacttgactgtagagcaagattatgggcaatgccaccataaataaaaccagtgcttatctgtctggattgccaatcaagtgaagaagtgcatgaagcatgtggacgatgcataagaaattcagagaatggggccgggcacagtggctcacgcctgtaatcccagcactttaggaggcggaggtgggcagatcacgaggtcaggagttcgagaccagcctggccaacatggtgaaaccccgtctctataaaaatacaaaaattagccaggcgtggtggcaggcacctgtaatcccagctactcgggagtctcaggcaggagaatcgcttgaaaccgaaaaggcagaggttgcagtgagccacgatcgtgccactgcactctagcctgggcaaaagagtgaaactctgtctcaaaaaaaaaaaaaaaagaaagaaattcagagaacatgtaacagtgcaattaagccctggggatttggtccaactgagtgtaagataaataatacctaactgtccaggcttcttggaacagattttttttctttctacgatctttaaaactgatttatgagtgaaattgaggtcagcattcccctttgtgtttcatctgctgatgttacagggtcacagtgacattttgaattgtaaaagggctgccagagttccagtacagcaaattttcccctcctagacttactctgtttgagaaaaagcaccagagggggggatgtgaaagtgacatttttcagtcaagcttctcttttaagtcaagtatacagggtctaacagatgctgttgtcagctggcaaactggacaggtaatcactaaagaggtcctcccaagccaggtgtcgtggggcacacctgaagtcccagctactggggaggatctcttgagcccaggagtttgagagcagcctgggcaacaccgtgagacctcatctctaaaaagaaaagataaaaggtcaagaaataaagagctcctcccagtttcagggctgtaggcctccctggaagcccggctatactgctcaggagtgctgggcctctcagtacatctctctgccaatcccaaacctctgtttgcatttagacattcaggtaacacttttcaaaatgtctctactgttttcacagttgccaagattcttcccactcttacagagatgtgttggagtctccagcatgcggtaggacttagtcccttcactgtaatccaggcctagggggttaggaatggggagctctatttgcaggatttgggcttactgtcattttggtctgttttagttggataagattgaccacaatgcacacagactggacatttggccagtcccccactactactttgttgttttgtctaggagtgcttattcttttccttcaaacctgaaaaatcttaggctctcatataagcaagtcaggaaaaattagagaatttcatagccgttttctttttctcctaggataagttagatacctttccctgggctccaaatctcagtttactgtctttccttgcaaaagacgtgtcctccctacccatgtccctctcagtggaggccagtgccagtgaccaaacagctgccgagctctttaactctaattagtactccacaccctcacatagaccttgcaggaggcctcaacccacccactccctccaacgagttgtgacgcagaccatctcaaacttcacatccacacgtgtcacatcaacgcacgtgacacaagtggccgaaatggtttcctccttataatttttggtgagtgacttggccgtggttcattccaagcggaagtgatggctggtggatatgacttgaggggaattcctgagggcaaggaaaaggaagaaaggggccccagagaagacgaggcacagctggagaaccctagggctgtgaacactgcgactgccgcgcggggcagctgcgccgtgtttgctggaagcctccggtagctgctgaaaccttcgctc

SEQ ID NO: 12825 - DNA, 2284 bp, Homo sapiens
acagccagattcgaaacatcaatatcagaacaaacttaggagataaggtgtctttcagacgagggcacggaggctctgtgtgggaggttgagggacttgcccaaagccatgccgtcagtaagatggcagagctgacatgactgacaccccctccttctgggcagtttgtgtcctgtgggctcagtctggtttaagaccacagatttgacttagactgtcagcacacacaagccagtgtcaccatttatttcctgccggtgtctttgggcaaatccattttcccttctctgtaaagtggaaactattttttttcttttttcttttttttttttgtgagacagagtctctctctgtcacccaggctagagcgcagtggtgccattttggctcactgcaacctctgcctcccaggttcaagcaattcccctgcctcagccttctgagtagctgggaattcaggtgtgtgccaccacgcctggctaatttttgtatttttggtagagacggggtttcaccatgttggccaggctggtcttgaactcctgacctcaagtgatctgcctgcctcggcctcccaaagtgctgggattacaagtgtgagccctcatgcccggccttcttttttttttttttttttttttttttttttgagtcagcgtctagctctgtcgcccaggctggaatgctgcagtggtgagatcacgattcactgacttgaactccttggctcaagtggtcctcccaccttggcctctcaaagtgctggaattacaagcatgcctaggtgcctggccaggtagaaacattagtcactcgcgctccaggaaggttgtcaggcagcgctgagcagtaatgtgtcctactcacctgctgtttatccagcaccagacctcttctaagaactttacctgtttcagctcactgaatcctcacaacacccattgtacagaagaggaaactgaggcagcgagtggttaagtgacttctccgaggttacacagctaggaaatggtggcaacagtaagagcccacgaagagctgcggttggtagttcattctggacagccctcccgtgaaccgtccctgtactggcacttgttgctggggactgtcgctgtcctctccctccccgggccaggtgtgtcctggagggcagggaagcgtcttggcacgcgggtgcgcgccgccccctcggcctcctgggctccctgaacctcgcaggaccccggcaacttcgagccccgccccagctccaggccgcgggggcgcatcgcgggcgtcgggcggggcggcccagcgggtaaaagctgcgcggccgcaagctcggcactcacggctctgagggctccgacggcactgacggccatggcgcgttcgaacctcccgctggcgctgggcctggccctggtcgcattctgcctcctggcgctgccacgcgacgcccgggcccggccgcaggagcgcatggtcggagaactccgggacctgtcgcccgacgacccgcaggtgcagaaggcggcgcaggcggccgtggccagctacaacatgggcagcaacagcatctactacttccgagacacgcacatcatcaaggcgcagagccaggtgcggcgggcggggtgctgggaggggacacccggcccagatgggggaggccacaggcgctgccccagcgtgcatgaagggggcctaaaagcgcaatcgggatattttcatgcaatattttaaaaatcgaattaatgctaaaactccacgatggacaaccatctaaatttcaaggaaagacataattaaaccctgtattgcactacctgccttcctggcttgcctggtcctagtctctgccctgatggggtggatcggggaggagggaaggcaggtggggacagtgggcagctccctagatggggcatgtctgatgtctgccaaggctgctggtggggctcagcctccaggcctctccaccctccatccccaccagaactcccccccccacccccccccacccccccccaccccgtctgaatcatcccctctccctctctccccacctgagtgcctgggggcaacaggagaatatatcaagaggtgagaagtgaggatcaagggtcaagacccctgacctgcccctaccctatgcccccagctggtggccggcatcaagtacttcctgacgatggagatggggagcacagactgccgcaagaccagggtcactggagaccacgtcgacctcaccacttgccccctggcagcaggggcgcagcaggaggtaacagctggg

SEQ ID NO: 12826 - DNA, 2283 bp, Homo sapiens
atatgtggctcgatcaccttttgaacccaggtctgcctgcctccaaagcttgtactcataactagattctcaactgatgttgggccaaggttcctaggttctctccttgaccttccttctgaagtaataatgctatgataagctcatcggaggctgaggcccaggcacatgtttgcctgaactatccatgttatatgattccttcctcagacagagtgagctactcacgatcccaggtgtaccctgaggccagccaaggtgtatccatgacctcatgcctctgttccagcctgccctttaacagctcatcccacctgcctgccctccccgcctatctgcagacagtagtctaggatttcagctgccctgggggctcattttccctctcagcttcctgctttagctgtctcctgcctcccactcacctattactccagcactctcacctggtcttcttttctgtctcatcactgcctcttgacatctttatctcatagtagttagttaggggttcttggtaatgccctaaatccacatggtgggaaggggggagtgggggaagagagtgcgctgtggggctgtgcctacttctggagggtaagactcgggccctccaggaacaaaggattcaggctggtggcagctatagccaagcagactgctggccagggattgcaaaggagtattttgtttgcttaagaaaataaacaacactgagtatgagatggagggagggggtgttggtgccagagagattgggaagagtctgccaagggtgtgttctactcactctcctcttttctttcatctccactgagctggaggcagttatcctgtcccccacgtcacattcctactcccgtttcccatgcctggacccaggttgggcaaactcttcctgtaaagaaccagacaggaactattttaggctctgtgtgccatatggtctcagtcacaactactcatctctgcctctgtagcacgaaagcaattagcaacaatatgtcaacaaacatatgtgaccccatgaaaactttatttattatggatacggaaacctgaaaataatgtctttcttttgattttttccccaatcattaaaaaacgtaaaaactactcttaggtcgcaaggttaagccattctcagcttagcagtggcaggctggatttggcttgtgacctacagttggccaatccctgattcccaaaatgtattcctcagggatgtgggcaaatacttatgggaaatgctggattaaacagagttaagaagcatcagacatttccaggacgggctagcacatgccagggctctctaactgacctcattaggattcatctgtttcatggaggatcttgcaagacaagaattcctcaaacctagagtctgaggactgtgctttgggaaacactgctctgcttgatgccctcactgggcacatggtagaatctagagctgagtgccttgctagctggagatagggtcagagctcttgactgccctggcagtcttgacacatcacgctgtctgtgtcccctgagtggttcagagccacacaggccaagactagcccaccagagcaccaggcctcccagctttctgggcttgtccatgcgtacatttccttattcttcctggtttccagaacctaaggagaggcacattttggttgagtgattataaccctagggaccatgggtagctgcatgtcaggaaacactcctcaacttcctggccctgatggattaaaggagaggtacttacaggttatttcttcgctgtggactactgtcccagcatgaatagggcatcattattgaattattttgacaggaaggagactggtgtatgctgcacagtaataatgtatttacatgtgtacagagtttaccaagcacctctgtgttgtttttgcctctgtttattacacttgcccttggggggaggtgggacaaattttttaaaaatttatacatgcagagactgcagcgcagagaagctaagagacttgcccctgcccacacagccagtggtagagcctgaactcaaacccaggtctcatctcacctcaggggctgctttccccatcgctgtattgtccttaaagtgatgggtgactaggcaatgaagtaattctctaggaaagcatgaccaatttccctttctccacctccctctttttcctccacccctcccccatcagcccccatatatatgcccaaatctccacaaagccttgcttgcctgcaaacctttacttctgaaatgacttccacggctgg

SEQ ID NO: 12827 - DNA, 2282 bp, Homo sapiens
tgatgtttgttttcacgatggtcttcagatgcccacgtgggcactgctgagaaagccacttggtaaaactgatgccggaaatggggctttttgggatccctgctcagctgcttctgagtcccagcatgccctgggttacctatggccctctttcccatgggacctgacctatgatcggcccccgctcctaggcgtggtgaccaagatgaagatgcagaggaccattgtcatccgccgagactatctgcactacatccgcaagtacaaccgcttcgagaagcgccacaagaacatgtctgtacacctgtccccctgcttcaggtgagcgcagtggcccatcaggttgctcaggccacgctctctcagccttcagattccagatcggaccaatttaaggccaactgagggagggaaagactgaggtggcatctctgggaagccccagaatctcaggatttgtatatcatatgttcttcagaatcaaagcgttctacagggtgaatatctctacctgaaatgcttggaaccagattttggaatgttctcgcatacatagtgagatgttttggggatgtgacataggtctaaacaagaagctcatttgtttcatatacaccttattcacatagcctgaaagtagtcttacgcagtgcgttttataattctgtgtgaaacaaagtttgcgtacattgaaccattggaaagcaaaggtgtcacgctggtattgaagaagtttcagattctagccaggcaccgtggctcaagccagtaatcccagcactgtaggaggctgaggcaggaggatcccttgagcccaggagtttgagaccagcctgggcaacatggcaaaaccctctctctacaaaaaatacaagtttgccaggtgtggtagcatgtgcctgtagtctcaggtcttcaggcggctggggtgggaggattgcttgagcccagaaagtggaggctgcagtgagccgagatggcagcactgctctccggcctgggcgacagagtaagaccctgtctctcccacacacacacaaattcagattttgcagcgtttcagaatttttggattagggtgctgaacctgtaataggcaggtgcgtttgaaccaaaaggttaggatgtcataccagatgggaacctcagaaatgttggaattaaacgtttgttcattccctcagcatgttttagttagagcttatcacgtaccaggtgtggtgtgagatgtttggggttcagtggtgagccaggaacaaagtcctgctccctcagagggcaccttcaagcagtgtgggtgccagatgacagccaagtataaccagaatggggatgtgggcagctgatattggtggccctctgggcggggaggatcttgggagcaaggtgaggagtcctgtgggtggagaggagggtggcccaaactgatgctgagcgataagggacctgtggttgtcagtgctgcaggatccccctgctgctctgctggggaagggtggtgaggctgctgacaacttgggggcctccagtttgcttgtgaaatggagctcgtccaccccagcggtcctcggaggggtggtggcctgctctgtgtacagcgttgagcttggtgcttggcacaaaacttgtacgaaaggaggggacaggttgaattggcgagtagagcttggttggggtttggtggagccgaagcagagagcctttagcctggtgaaggggagggagggcctcctggggtctgctggggtggcccctcctgaggacatggccctacctgcctccacagggacgtccagatcggtgacatcgtcacagtgggcgagtgccggcctctgagcaagacagtgcgcttcaacgtgctcaaggtcaccaaggctgccggcaccaagaagcagttccagaagttctgaggctggacatcggcccgctccccacaatgaaataaagttattttctcattcccaggccagacttgggatcttccgcgcctttaccagagcattggtgggggtgggggtgtgcctcggggaattgggcagagctgctgtcagagaggctgcctgcccatgtctgtgggtgaggacagtggagcctgaactgagatgcctgccttcccctgggtctccttctttggtccttgtcaccttttcggtgtctgaataaggctgattacctggcgttgcgctgtccccccgccccctccggtctctggggaggaagtgagtgacggcggaggcccctgggtcctccaggccctggtctgtctctttcctgaccacctc

SEQ ID NO: 12828 - DNA, 2282 bp, Homo sapiens
gctgggactgggagcttataaattcaggcatcctggtacctgctcccttctggcacccaagctgccctagatgctgctggaggatctggaggaggtgagagctttgagacaagactgagggaggggcaaaggggagattcactgtgccctggtttcaaggggaaacgttgaccacgcttggagaactgagtgtcaagggcatgggtagatccacgtgtcctttaccaatgccccaaattgaacctgaaccaagaaaatgtcctggaatggccagaaggagctgcagtggtggggagggagggggatggagtggatcaggaggacgtccctgaagtacttgtatcagagccaagaacgtggtcaggagtgatcacgggttcaagtcagttcagcacaacctcccggaggcctcctgtgtaccaggccccaggtggggcagtgctgaggtcacagaaagaacctgacctgagccccatcttcaagacccccagatggagaaaagaacaggccagacctcagcaagtatggggcatctgcgctgtaatggagacagaatgggtgctgtgggattcaggggagacacctgttaggtgttggggcctcccagaagaggtgggggcagagtgtcagaggacaaagatgaatttggaagatatggggaagaaggatttcaattcaccctcaaagcttcctgaggcctcccgtgggtcgggccctgcagtactggagacccagagtggagtcagaccagctcctcggggagctgccagtctcgtaggggaggcagacaccactgagggtcaggggaggtcagagaaggcctcaaggaggaagcggggctggaagggaatggcgttggatatgcggtgggaggaatagcctaagcatgaaatggcaggagggaaaatggcagcactggctgcgtctaggacaaggtcatgggagacccagggagaggggctggaagggaagaagccacttttgtccttgaaagtgaggctggagccaggcaactcatgcctgtaatcccagcactttgggaggctgaggcgggtggatcactagaggtcaggagttcaagaccagcctggccaacatggtgaaactccgtctctactaaaattacaaaaattagctgggcgtggtggcacacacctgtaatcccaattgcttgggaggctgaggcaggagaatctcttgaacccagaaggcagaggttacagtgagcggagatcacgccactccactccaacctgggctacagagccagactccgtctcaaaaaaaaaaaaaaaaaagaaaaaaaaagaaagaaagtgaatttgaagagctggactttatcctggtggtgccaaggatccatggagggtggtgagcaggggaggggcacagccagctccagatgtagaaagaccctttggggtcatggctggagggcaagctggtggaggggactggactggagggggacccaaaaggccagataagagggttgagatagaccaggcgcggtggctcatgcctgtaatcccagcactttgggaggccgaggtgggtggatcatgaagtcaagagattgaggccatcctggctaacacggtgaaaccctgtctctacttaaaaaaaaaaaatttccaaaaaattagccgggcacggtggtgggcgcctgtagtcccagctactcgggaggctgaggcgggagaatggtgtgaacctgggaggtggagcttgcagtgagccgacattgtgccactgcactccagcctgggtgacagagtgagactccgtctcaaaaaaaaaaaaaagttgggacaggggtccttggtgatgatggagagagatccaggggctggtagcatggtgctggaggctgacaggtggaggaggtggggcagggtctgtccgagtgcctagaggaagagtaaaccttccagagatgggggacccagaaggaagcgcagagtggggttgggggaaggggataccggtggtcagaagaaatttattaacagtggatgggataagtctgtgtctggagggatcctggtggaggcagaagggtcctgcctcacctggattctctcactccctccccagactgcagccgaaccctggtccctcctccacaatgtggcttctcctcactctctccttcctgctggcatccacaggtgaggtggccccaggagggggccaggtctgtgggagcaggtgcccccttcccaagcatgtctgggcccagtgatctgccagcccctacctcacccagagaccactaaaga

SEQ ID NO: 12829 - DNA, 2270 bp, Homo sapiens
ctccttccaaagcaattctcctttcctactgccccgtcaggggccctgtctgtgctggaatcatcattgtcctcaactgcaaaatggaaaataaaatgatagtggttcctccctcccggggttgccaagatgattaaataacataacaactaagatgtatccggccccttctcctctacttgcaaggcatcgatcccttcattcctcgcaatcacaccacgtgaaggtgccatgaagccaccccattttgcagaagaggaaactgaggttggagaggtgaaagcactcagccgaggtcacacagctatgtcccactcatctttgggtgaccctcaggttcggaccctgaggtctgaacactgcattaagctctccagacagaatcaacttcggaactagcgccagagaccactaagtcaatcccaggtgacaccatcagcactcaataaatggtagccactgccggtgtcgcagatggatcaatgggaggtcaagcgttgtgggtaggtttggtttctttaagccactgaattaactggttatttttgcctgctggcagtgcagcctccattgtgtaaatgccatctcacttccaagacaatcaacgtgtgacttctcccagccagactagccaggtctcccgagacttcccggagggcaggggctgtgtctggagtggctgaattccccggctcagggttgcagctcagccagtttgttgattgaatgaatgaagaaatggctgaaagcaggggtggtaatgatgacctccttcaccctaggaagtgaatgggacccaggtcatctccaggcccagccagtatttgcagtggcaccccaagggatgctgggggaccccttagcttttctcttaagttgcagcggccaaactgcagcaatatcttccctgataaaagacacgctggtggtattgccccttcctcaaggcaggggctgagggcgcccagttcacagcagggtgccatctggggtagacgctgggtattgccccactcctgggccggggcctgggtcctgacctagtgctggctgtggctccaagagtgagcttctcctcccaaacagaagacggtcagtgcctctgaacctccctctgggctgggcacgcttggactcctccaaagagcttggaccagcctgagccacatccctgggcttgacttctccagaacaagcctcctggtctttctgggagagctctggcagcatcactgtgcctgtgcagggagagcgggaacccacttcctgcaccggctttctctgagttcttcaggatgaattcgctctggtctaggtaagttctaccccgaggccaccttcacttcccaaattccagcttttccttctctatccaaactgttacaaacacagtaacaataatttttaaaagctttttttttctctgaacacactaagtccctgctaattactgaaactccaggcattacaggaatatgtggacacttaaagaatcaggactacgtgggagagggggaggcagctccccagggtcctgggttggcacacaggctccaccactgtgtgactttcaacaagcgacttccttgaccagctgcccgctctgtaaaatggggagagtaatattcggccacactgagtcggtgtcaggttgagttaatatttggagagtttctggcacaggtaggtgctccttaagtgcctgttaaataagtgaagctttgagaaagtgtctaaaaggcgacacactaaatttttaagaggctggaggtgggccagggaggggaggtctcttatgtaatattttaatatctttttaaacctgaagaatgtgttcttgtagcactcctgtaattaaaacttaatgaactaaaagtacacccctcctgctcataccccttttgaactccgcagccgcgccccccagccggaggccccttgggcagcagacaatgggtgtggattcgccccaggtcccgccggctggggcggcgacaatacaccagtccccgacagctatttacatgacaagggcttccgggcgtgtctacgcgagttcccgtctttcctggtcgtcctccttgggttcgggtgaaagcgcttgggggttcagtgggccatgatccccgagctgctggagaactgaaggcggacagtctcctgcgaaaccaggcaatgggtgatccatcttgggggcttcctccccctttctccaatttctcttccctgagcccccagggaccttgtgctcctcagaagataggctagcc

SEQ ID NO: 12830 - DNA, 2270 bp, Homo sapiens
atctgaacagggaagttctgcaacaggaggggattctgatcctggagccacggagctttcaacagacacttcctggacgtgccaagcaggtcaggctgacaaacgagtgggcactaaaaggcacaagaagctctcacatgtgtacaggcctccaggactacaaagcacttgcaaaggtgacctcatctgagtaaactttgaaagtgctcttcagtgttgcttctgtgaggcctacttcactttttaccaagagaactgctcccaagtctggctgatcctgacctcaggactgtaagacatgaaggtggcacacagggaaggagtaagtcaagctaataaatacatgtctgaacatgcatttatattacaagacatacggggaaaaacaggagcaactctagccataaaataacccgtatatgacaagttaaattgagaaagaattacctactttcacgaagtgcgctgaggtttattgggctctgcgcttccttaagagtattagaaaagaacacacaaaatgctgaaatatgggatttcattatctcagtttactttaatttgcttgtttacacacacgatctgtgtgtacataacagtggcaagagccattctctaaatacaatctggtacccagactatgacagatgcacgtggaaaatgaggcgtcagtgaattaatctcaacatagaaaggcaaaataagcatggcagtattctatgatcacagatgcccccagagcctgggggtaaccgacacttttcaacataatacaggacaattttaacaaaagacccagactccaaatggcacccaaaatatattcgtttctctgccttctctagaggagtcagaaagttctaaaggcttactcaagaaaaaggaggcagggagactatggcctgctaagcacagatgctgagcactttacatgcaccatttctcttcatctccacctgacagacgatgaaaacgaggtttgccatgatcacacagctatcaggagtggtgccaagatatgaacccacatctcatgtttgcttgagcccaaatcctttcacttatgtcaggctgtttcacataggaatagaaagcatgctcccaaggaagaggcaagggggctaagcatggacaagtggcggaagcctcatcgatacagaaggctctgcaattgacactttccacatacagttaatttagtgctgagcccgcatcagacccacgtgggataaatatctggagatttaagtgtcacaaatgaacttctggggtcaccctgtgcctattcccttttggtgctgaacatgacactttggagagccttttttttttttgagacagagtctcactctgtcgctcaggctggagtgcagtggcgtgatcctagctcactgcaacctctgcctcctgggttcaagcgattctcctgccccagcctcccgagtagctgggattacaggcgtgtaccaccacacctggctaatttttgtatttttagtcgagacggggttttatcatgttggctaggctggcccaacctcaagtgatcctcccatctcagcctcccaaagtgctaggattacaggtgtgagccaccatgcctagcctaggagagctttcaatcccttcaacaagcccctgccatctactccatggccactcccaccactggtttatgggcataggcaacagagggtcacatcttaccaacgcctccaaagcaccatggtgccacctcccatatctcatcacctgtgtttctgctccttttgggtgcaacaaatcatgactcattgtgatggataaaattaacctccaacttgatgggatatgaaatatttaaaatatatccttatagtaaaagattttacaccgaagattcatcctcaaccacttaagcttcagtgaagccagtcaggtgtagtgcttctcagttaatgctactattggacttgattggagagaggggcatcaaggcggccttaagggtgattaccccaacagcaaggggctcagtttgaaaggcttaaggagacagtctgggagagaagaggggatatcttatcacagggcgtggaactgtgcctttgtggatggaggtgacaggatttctaacccttcccagcattgtcacagcaaaggccacagaatgacaaagctggaaactgaaaagtgctgcaaaggggagagaaaaaggaaactgatttcaagtccagctgaacaggcccaggtatggtttggtttagtttggttggtgatgcaagtaacag

SEQ ID NO: 12831 - DNA, 2269 bp, Homo sapiens
agtaagacagggcagcagtggtcactctccctcgctggtgaggctgatgtgttgggaaagccagacttgacttctgtcctcactgtaaacagaaagcttctgtagtggactctaaagtgggaggtatgtaacccctttgcatatgagataatcttttggagtgtgggagaacataatctaacttccagttatatttattgttattgcaaaagattaacaaattatcattcattcatattgaatgtgtgaattggccctatctcccacctgagtctgcagtcatgacagatggagcctttcaggtgtcctaagggaagatggggttcacctcacaatgctaaaggtgaaaaggggagtgccgaccctgccctttgttttggcatttttatttccatactttgtggtttgtatgtgcccagttaaacggatgtacagattagataatctggctttaactccaaccttcacgagatgcacacatgccttaaaaagattcttacaaagaaactagaattaggagacaattctgacaacacaaaaacaagtgaacaaaaatcaaatgactgacctgacgtgtccactaggcttgatatgagcttggtcaactaaaacatgagacagaatgaatgaccatctggtcaggttggataagaagtaacttttggcaaaatctctgaagtctggatttacacttcgtggaaggaatcttgacctttccccaagtatattatgccttgagataataatcctgtataaggccgcataagcaaaacgacatttgaaaatgagtttcatctttagctcatccttttacaaatttctattccttgtgcatgattgaagtgtacacattttttagttaaaatataagcatatagaaggcacaagttcaatatttttcatgataaggatgtgtaattaaactggttaggagactcatcgactagagggggacatggtggccccaggctgtaagaacaggccacaccgtccactgggccgcttgctttgtgctaagatgacactttgttctgagcctcacagtgtcttgaccatgttcctggaaccttcttgttggagggagttcatcttcccctatgactctgtccctagtctaaggtgtcccacaggaagcttgagggcgggaagttttccagcccaggagcctgagctcagcggggcaggaagagggagcagctcctccgtgggggacctttgagagcccaggagcaggatttcgagggacacctggtggggagcaaaaggtgctgagtctgtctttgaccttgagcccagcttgtttctcctgcatcctcccccaaaaggggctttgcctgtcattctgcagttctagtgtggggtctgggcgcagttcttttccctctccagcctcggagtcttcctctgtggactgcgcagataggactggtggcacggaccagctctgcagccctggagtcaggagcagagccccccggctcccagcccgccgtagccgctcctggcaccgagcgagccgcgatgacaatggctgcattgtgcttcatgtcccttcccatcaacatttctgtgctggactccttccactcgcgggtcgtctccagagctcagaaaatgaggtgatcagtgggacgagtaaggaaggggggttgggagaggggcgattgggcaacccggctgcacaaacacgggaggtcaaagattgcgcccagcccgcccaggccgggaatggaataaagggacgcggggcgccggaggctgcacagaagcgagtccgactgtgctcgctgctcagcgccgcacccggaagatgaggctcgccgtgggagccctgctggtctgcgccgtcctgggtgagtgcgggcacggggtagcaccgcagagtcgctggcccgcgcgttccctgcaacccgggcggccaccgcgcagcctgcatgcactccgcgctcaggctggaagcctgggtgtctgggtgcctttccattgcctctctacgccccacccctggcctttgcttgggcttctagacacctttcactgcactcactgtcttctccccctcctcctctttgtccagtaaatcttgcagcagtgaaatacaataaatcagagcacgtctaaccaggttatcaaaaccctttgctgctgcctcttgtcaagtccgaactccttagcatggcattcaaggcctcccgggtctgaccattcccctttcagaggctgatgtcccctgggtgccctgggagctgtagatgtcctgccaaggaag

SEQ ID NO: 12832 - DNA, 2264 bp, Homo sapiens
gtgtcagcagggttgatttcttctgagacctctctcctgacttgtagatggctgccttctgactgtgtcctcacatcctctttcctctctgtgtccttatctcctcttcagacaccagtcatattggtaagagcccatccacaggactccattttagcttaattacctctttaaaggccctttctccaaatacagtcttattctgaggcactgggggttaggacttcaacatatagtggtgaggagaggctgaattcagcccagatttcctatctgccccgcacagctattaacctagtgaaaatgagagatttaggaaaacactacacgtgcagttacatcctgtacaatataaaagggtggctgttggagttgttaaattagtcacagcttcaactattttaaaatcatttatgaatttaaattgcttgtatgggatgatgtatatagtggctactgtttcagagagcaaagccctagaatcagatgacatccagaatgtcatgttgaagatcgtatctgcaaacaagtagtttaaatttttaaaaacttctcttaattcaaaaattcaaaaaaaatgagaaaagtaatctcacaagtagtggttaattatagaagatgagaggtgtggaggttttttttttttgtttggggtgcataagcttaaaataacatgaaaagcatgtcaaaaagaatatgagaacagagtggacttgaaatttaacatatcctactggcatcacttgtttatagaaaaataaaatggatcatgtatttatttgaggactcactatgctttctttgatcacatttttataggtacagcgtggtgttcaaacttttaatgtatggagaaaaatgaaacggctagaaaaatggcccagtacagacaattctatgctcaatccaacttgaacagaaactacaggatttggcctaaacaagactgaaagggaagcccttatcaggaaagccattatctgagaagataaaataaagtaatactttgtttttaaagtattatacaattcatatctaatatttcaacctcagcctttcaagtgttgtctaacaccaataataatattgccacccctccctcaaccggttatcttcttttcatatttctagctacttaaatccaccaagcaaattctggtttcgctatttctggatttaagtacattttctaatgcacccaggccacacgcaggaatggacacagctttcgctctccgcataagttttctagcccagggcaagctctcagaacgtgactcctcgtgcctcgctgcccgcccctcgctccccccactcccgccatcatcccttccgcagagttggctgccaagccgacacccacagattctgcattccacggcttcccagcatcctgctgtctctgcgtggaggaaagggtgctgcgaatcccagtttagataaggaaccccgtcttttcactactacaccgaagcatgcaggaatagggcgttgaccccattctcccagctcagggcacaggtgctaaggccgacccatctcacgggcctgttcaccagtttcccacactcagtacagatcctaacacggtttatgcacttcataaccatgcgtttgtgtttgtcaactgacaaacgagtgataatgacaaacgaatgacacaagggaaaccaacagccaatcagagcgcaaggttgtgttgccagcatcccagtttcagggacagtcaccgccaagcccgaccctgcaaagggtcgtaaccggacttcggggcaaacttcaggtcccccgcctgctagcccgccaaccccctccgccaggcagccggcgcgcctccaggttccgcccaggcgtcgctgagtggcggcggcggggagaatgcgcgcggcgcagccaatccgggggcgttcctacaccccctgcccgcccccgaccttccagagcagagcaggacactggcgccgcgggtcaggcagctgcgtgcgcgtctcctccaggcagcaaggggaacccgaggccgccggcgcccggaccatgtcgtctccggggccgtcgcagccgccggccgaggacccgccctggcccgcgcgcctcctgcgtgcgcctctggggctgctgcggctggaccccagcgggggcgcgctgctgctatgcggcctcgtagcgctgctgggctggagctggctgcggaggcgccgggcgcggggcatcccgcccgggcccacgccctggcctctggtgggcaacttcggtcacgtgctgct

SEQ ID NO: 12833 - DNA, 2258 bp, Homo sapiens
aagggagctggaacttaaagtggtggtgtttgtccgagatgacggtgctcctgccctgtcacctactgcctctctccccattgcagtgtcaccacctatcacatgatgtcatttactagtatgtcttttgctgattgtctgtctctttctgcttaagcggaagccctgtgaaagtagaggtttctgtttggcttactgagtccaagggcttggattaggtctgggatggaagatgaacaagaggccaattcatggactttgaattcctgtaaaacagcctgaaatgatgggaaaaggagaggctctatccgacgtcaccagagtccttgagcgttggagtatttctttcaactgaagcctggaccagggctatccagatatacagagagggaggcggttctgcctattggaggaactactgtttccgaaagtgcaatgtttaacaaaggcagtggtctaccccggggggttgagacctctgaaccctgacgtggccataaagccaactgctataggactggcaacccagaataagaagagtgaaggaagccaacagagatccctggaggttgtgttagtttgcttcggctttgtattaggtactttgtggcttacacaacagacattttattgtctaacagttccagtggcagaaatcaaagggcccaacagggttgattccttctgagggctgtgagggagaatctgctccatccctctctcctagcttccagtgttttctggtaatctttgccattccttggcttgtagaagcttcaccctgatctctgccttcatctttgtatggccttctcccagtgtgcctgcctgtctccaaatttcccatttttgtaatgacatctgtcatcttggattagggcccatcctagctgccctagtgatctcctcttaactaattatatctgcaatgaccctatttttaaataagatcacattctaaggtaccgggactccaacacaggaactgagagcaggaaggaggaccacagtccaaccccttacacagtcgagcactggaggtaaatggtattctcgagaggaaagctgtttgatggctcttgggatagattaggttatgctccagcaactgcccatctcaattatcatcagcttaatacaacaaaagtctatttctcactcacactaagacccctgtgagctgcaggactttctaggacaactgtcttccgtgccatgattcttacaccccagattgctttcatcttctggttctaccagtggggcagggaagggctggggagttgcatctcatagtccccttgctggagaaacctggaagtgacccttcataccagtgctcatgttttaccagtcagcagcagggccctaggtctccatccctgcaaggggctctagagtgtagggaacagatggaatgttcacaagcaccacagcccctgccacagtgacttttttaggactggtatcgcagagtgtttacttaaggcggtggaagctaaattcttagcatgtgctggagagcaatgaaaaagatatttactttatgaattaaagctggagtcagtgtcagcccgaaggctgaaggaaaaagagcaacagatccagggagcattcacctgccctgtctccaaacaggtgaggatggggaataaagtgaaggcagtgctttggtgggaacttcaaggatagcctctggctttttccaggtttagaagctcatatgagacaggggtggaggaaaagaagaaagaagaataagaagagaaagttgaggccctggcccaagttagtgggaagggaaatccacccccattaaactctctccctggtggactgtggggtgcacacgtgaggcctgcacaggtgctggaacatggtagaggcccaggacatacttcctgtgaatgaatgattgagcggctgaatgaatgagtaccactaaaagccctcttttctattcccaaatgccacattgagcagaagggagcaatccttgctcagcaattggtagtccctttgggtgtgcaaatgagtccacagcctgcaacagcagacagtctctgccccccttagaggcgattgcagggaggtggctgaccgttgatcacacccagagctggttatgggaatttactccatggaaagactgcaaaactgcctgaaatgtgttttggcatcagctactgacacgtaaggtttcccaatcctcaactctgtcctgccagctgatgaggggaaggaaagggattacctag

SEQ ID NO: 12834 - DNA, 2251 bp, Homo sapiens
ttgagttggtccatgtgagtttgaaccctggccgcagctggtatgggtacttaatctcagtatcccacggtttcctcaactgcaaaatgggtttttagtagtacttacctcactgggttgctacaaagatacttaaactagtatctgacatctagtacagccagccctccatatctgtgggttccacatctgaggattcaatcaacctctggttggataaaaaatatctaggaaaatagctgcatactaggggaaaaaaaaaagaaaaaaatatccaggaaaaaaattgtgccagtactgaacatgactttgctcttttcattctctaaacaatatagtataacacatatttacttcacatttacattgttttaggtattataagtaatctatggattatttaaagtatacaggaggatgtgcataggatatatgtaaatactatgtgattttatatcagggacttgtcctggaaccaatatcccaaccctaatactaagggatgactatatatgctcagaagacatttgttgtcatttttattctcttgcactcaagaaagcacatattggaatgcaaacgaatatcaataatagttttttaaaggataattaagttaatttataatttacatacaatatacattgtacatttatattttctaatgaaaaggaaataatctataaccttcagttcagaattcattagctgtcctattttgagaactgttgctctatgtaattttcatctctgtattgatgtgtaaaactggttttaacaggtagctaaatgctgtttgaaaagcatacttcacccattctggcaactaaaataattgaaagatttaattaatttagaaaaaatatttcgctttcaaaacacttgaactgttcagagcatgttattcaataatctacctttcaccagaaatcataataaacacaataaaaatgcttacagaacccccacaatgcgttagtatacatgattattccttgtgtaagtgaatcttgttgagattttatgttcagtcaattgcaattaaatactttacatattaactaaaatgtgtcctgctctatgtattctggagaagttactctcagacaaatttacatatttaaattattttatgggctaactgataagtatagagaagactgaagacagttaagatcattgatttcaaaatgttttaaagtgttgattatttattttggttttctttctttcccatgccagttttgagatgcacctcttacttggcaggtgttcctctgtactgggtactgggacagagagaaatacagtagcaagagggagatcctgcctccgccccattctaccattctcactgccagaaagccagccttttttcaaggcttgtagagaagaaaaagagaaaatatttttaaaaattcatttaaagtacctactgcataaaccacaccagacatgatgagatattaaaatgtcaatattattaaaaatttttaatatgattttacagcccctttgctactttaaaatgtttatcttagtgttaaacaaacaatcaataacctcataaacttaaaaattgctgcaggaaataccggacagtttatggaaggatcatatgacagaaggaagggctgaagagtgtgagaagctagacctctgcaggttaccgaagtcaagaacctcattaatcggtaacaagaagtgcagagcgggcttttgagtccatgcctgagtaagaaagtcccaaaaaacactcacagaagatatttccttgcccctgcttttagtttagctgtagctaactttggattaacaaaatttatgtgctgaatgatgttttatttttttttccaactccacatgcctgtctagacttcaagctttattacgaataaagagaaaatcggctggatggcataaaaaatatttcaggcagattaacacatgatttacctcttcttgaacatccatcttaatggaagtgctaagaaagttagattcgggcctggcttggcaaaagcaaggccaccccctcctctattttttcaatgagattttccaatcctagtcaaatggtggtgctagttctttatttttgagttactgcatttcctaatttcatggtcataacagcctcctgtctaccgactcagaacggattttaccaaaactgaaaatgcaggctccatgctcagaagctctttaacaggctcgaaaggtccatgctcctttctcctgcccattctat

SEQ ID NO: 12835 - DNA, 2251 bp, Homo sapiens
tccggttaaaccagtctgaactcactgtctaaggtcctaacaaatgatatgacctttaggatttttaaacatggggccttagtgttcttttgtaattaatgagatttttattttagatgcctgaggaagtgcaccatggagaggaggaggtggagacttttgcctttcaggcagaaattgcccaactcatgtccctcatcatcaataccttctattccaacaaggagattttccttcgggagttgatctctaatgcttctgatgtaggtgctctggtttccacatttggcatggtttttttttttgatactctagaaggaggggaaaggagtggtttggcctttgttggggactactattgaagggggtaaacttgcagctattccaaaaagatgggttttactctggccatcttgaacttggaagggactatgtccagaataagtgggctcatggaactaactggttctaaagcctcaagatagggggcaatcagatttgaggctgagagaggtaaaccaagattttctttgaagatacgggctttaagaaagcaaaagtggctgagcgtgttggctcacacctgtaatgccaaggcaggaggatcacttgagcctaggatttcgagggcagcctgggcaaccgcgagaccttgtctctgcaaaaaattaaatattagttgggcacggtggcatgtgcctgtagtcccagctacttgggaagctggggttgggaggatggctcgaacctgggaggtcaaggctgcagtgagctgtcatccttgccactgcactgtagcttgggcaacagagcaagagtctgtcttggaaagagcaaaagtaagttgctgtttgtatttccaggccttggacaagattcgctatgagagcctgacagacccttcgaagttggacagtggtaaagagctgaaaattgacatcatccccaaccctcaggaacgtaccctgactttggtagacacaggcattggcatgaccaaagctgatctcataaataatttgggaaccattgccaagtctggtactaaagcattcatggaggctcttcaggtattgcagttctgtaggcattcatacttatctgtgttctttggttttttgcttctttaaaacttgtgattgactttaaacttgttggcaggctggtgcagacatctccatgattgggcagtttggtgttggcttttattctgcctacttggtggcagagaaagtggttgtgatcacaaagcacaacgatgatgaacagtatgcttgggagtcttctgctggaggttccttcactgtgcgtgctgaccatggtaagttagcttttctgttacaaggtagttgggttaggattttctgggctcacaccagtagcagaaattttgggcatcctgtctgtaaagcagttcttcacagcagttctgctgatacttactaattgctggtctcaactgcatatactttttaccctgttacacgcttgtaattgactcttctaggtgagcccattggcaggggtaccaaagtgatcctccatcttaaagaagatcagacagagtacctagaagagaggcgggtcaaagaagtagtgaagaagcattctcagttcataggctatcccatcaccctttatgtgagtatggacttttaaatcttttacacttaacgtgcaggatgtttcctgttctggagaatctcattgtccctggcttttgctttccctggtagtgttttgtactccaaggctaacttctgtttttgttacttagttggagaaggaacgagagaaggaaattagtgatgatgaggcagaggaagagaaaggtgagaaagaagaggaagataaagatgatgaagaaaaacccaagatcgaagatgtgggttcagatgaggaggatgacagcggtaaggataagaagaagaaaactaagaagatcaaagagaaatacattgatcaggaagaactaaacaagaccaagcctatttggaccagaaaccctgatgacatcacccaagaggagtatggagaattctacaagagcctcactaatgactgggaagaccacttggcagtcaaggtgtgagaagcctttgcatgttggctcaacatgcacatatggagaggaatgagttaggtggaagagtgttgggtaatagacacacggaacttgtccaactgataacagaaatgtgatagccatgtgatttcacttactgattaccctgtcatagtgaagtgccat

SEQ ID NO: 12836 - DNA, 2248 bp, Homo sapiens
ctcccaggtgtccacagtttaagatcaccgagtatctgctctagttagaaggatgcatcaaggaatgggaagcattggctgaggggaaccactaagaaacacctgcctgggctggcctttcccctgggtgtgtccacagacagcttttgcccaagaatttcagtataggtgagaaacaggagagatgggtggggctgtgtcgggcgttggttccttccggcgggtatggtctcactgacttcaagaatggagccgtggaccttcccgctgttatagctcttaaaggaataacactctttgcagacccaaagaatgagcagcagcaaggtttagtgtgacgagcaaaagaacaatgcttccacagcctgtaagggaactggagcgggttgcagcagctggctggggtggccagcttttattgtcttagttgtccctgcccacgtcctgctgattggctcattttacaaacctctagctagctacagagcgccaattggtgcgtttttacagagcactgattggtgcattttacaaacctctagatacagaaaagttctctaggtccccattcgacccatcaactccagctggcttcacctctcagggctatgagacttccgtcccttcttgcgggtctttcaataagtccctttcctctcttagctagggttctccaaaaaccacgaagaggaagacttccctacgtccgaactggggcacttctgcgtttcttccctttccctccaccgttgttctgggtagggctccacatttccctaagcactctggccaccccctgccccaaggcagctactttgggttgtgcaaggtaaggtccatggcgataagattcacgttggcaggtccggcagccccgggccctgtaagtgatgcggcgtgtggggcgggggccggggcggagccggcggccggtggcaccacacatacggaccaatcgccgtccccgccgcggcattcccggccccaaatcacactgcgggaagctccagcgttggtgcctgtttcgtctgcgcatgcgccgggacacgcctgcgcccttggccgcagtcagggctcccgagtggtcactctggttgacccgcgcaagctctggcctcgcccactaggctggtcgcgtcagagggtggggcgggtcttcgccccgcagcgtctaagctctgctgcgacgttatgggaacctggtgacccgcggcacactctgggacgccagggtagtggatagggacagtggagggcatcacgctgcagggcacgggatcagagggggatgcaaggggaggggacgccattctggccgccaagggggaaacgcggtgaagggaacgccccgactttcgagtccctaggactgagtccccaggactccaacccagcagagaggcgccggggccttagctctgagggctgtggtctagaaagggaagcagcaggcctggggctggggcgcgcgccgaccccgcagtgagaccaagggaagaagggacaggaccccgcgaagggcctaccgccccagagcgtaaacagcggtccgctccgcggaatagctgaagacctcgctggcctgcggctcagtggcctccccggcgattcgagaacagctctgggggtcctcgctaagtgtatgccattcccaatcccttatgtacgccagcggccgcttgccctccccggccagcgctgtcccttccgcgtcctccagtcttcacacgacgcaggggtccccaaggcagcggtctccccaagcttcccgtttcagccccatcctcgagaatgggctcctttcctgctccctctccgctcctgctggcgagtggagaccggcacctaggtccagacgcggctgcgctgcctctcctagccatcgagacaggatgtgactccctcccctggccactgaccccctccctccccaggcggcctgcatccttgctctcctccctcctagcctacccagctcggggttctgtccccgcccagagacctgaggctcggggctgcagatggaatgcacggcagggaggcgggaccctttgtttgtgtgtgcgtgttgttggcctccatccccactccccagactccacttctccaggcctctctcccgccttttcatcccgcatccgcaggacacccaatcaccgggcaacaggtatgatcaggcgcctccgggctttcctccgaattagtcggtgtttggctcggagtgcgtaactctgtctcccctgcactc

SEQ ID NO: 12837 - DNA, 2246 bp, Homo sapiens
tggaatgtatcctgtccagtgaagctcaaggcatgcacaggtcgtgttcacctcactccctcaggagttgaaggagataagaaactggtcccacagccctcaactctagcttgggtgcctcgcagctactcagctaaccaaagaaatgagtggaaaatcagttctctggtctatttttgatggtgtgagaagaaggaggatgaggaggagaaggagaagaagaagagattacttctcattttaattgaaatgagtgactttttattaatgagcttgaattcagaataatttattaccctggagttttcttataatataataagtgagactgttttcctttttgcttagggcaaaaaatgtaaggaggctgagtgttacatttggaggtttatcttttttttttttttttgagacggagccttgctcttgtcacccaggctggagtgcagtggcccaatctcagctcactgcaaactctgcctccccggttcaagcaattctcctgcctcagcttcctgagtagctgggattacaggcacccaccaccacacctggctaatttttgtacttttagtagagatggggtttcaccatgttggccaggctggtttcaaactcctgacctcaggtgatccacccaccttggcttctcagtggaggtttatcttgtcaggtttggcttccttttcccagttccatgaaatgtgaatttgaatatgtgtttgtgtggtcagggagagtgttgggaaatgagggtgggatacagagagaaggatgatttaaaggtttagatggtctggttatttttagtttttctattcccatttctgcaatagtttttatttttcctcatacactatgggagtttgttcacagaaggaagttcctggagcctatccatcaggaacattaactatatttttgtttgtttttttgcataactatttgtttagtttttccttcccaaatttgtggctgctgtgttcttgtgactttttgtcgggggtgtttttttcttgcttgcagtgttacccacaatgcatctattttgtgtgtattaaacagtccctttcaagagtacaaataatggtttgaaataggaagagtatcccaaatgctttaatcttatatttgaaatgtaggaaattggaggagctgaggatatttgtgacacatattttacatcttctcattgaaagtagagctgttgtttgtctgcatggttttgagtttggtcactgaaatgctaatgacacagcagaaacccttggtgtgtgcataaggccacatgacctcaggtcaggaataaaagcttagggctgagcagctcactctttggttgagaatccagttggctcccctggagtgaagttctacacagaccctggaggaaccaccccatctgtaaggaacctaagtttctgtatttctggctttcattgtagaaaacctgatgtcttctatacttgttcccttgacctacttctaaaacagtttataaacaatttcaataatattcacagtcaagtagagctgtcttttactgatatattctaaacaacataaattaaggtggagcttagaacatataacacaactatgtcctaatgacatgaggagacacctttctcctgcaaatagtcccagatatacatcagttttcaacttgtcaggatggcggataagattctgctgtaggtgtctttaattaccaagtggaactaacattctagtgttacctgcaatgtaatgaagagcctgattcatcttgatctttttcactgtacttacttatcgttttcctgagaaagtgtggctttagcatttgttttacctgagcatataaaggtataaactcaagcagaacattgatagaatgaaagctagaccctggcttaatgtagtccttgaaggaacaagatgcattaacaaaaatggagtgatggttctagtagagctggtatactgatgcgtgctgattgttacttctctagcacatgttatttgctacccttgttaatggtcattgcattggttgcaagtcttggttattttatattcaacactttaagaagaaatgtgcttccctggctagttatcagattttttatttttatttttttttcgacggagtctcactctgtcgcccaggctggagtgcagtggggcgatctcggctcactgcaagctccgcctcctgggttcacgccattctcctgcctcagcctccctagtagctgggacta

SEQ ID NO: 12838 - DNA, 2246 bp, Homo sapiens
ctccctgcttccatcactaactccgcagggacactgtctccctgaatgtgggccccacttagtccgcaaggcagatggggggattagactaggcccagcccaaacaatacagcagaaagggccctccagctccatgcagtgcccccacaagctccctcctctaggacgccgatggggagagccaggcaggacgtggaccctgaagacatggcctgctcctctgcctcccctctggtggtctcctttccagagcagcttcctcccttgtgcccacgtgtaccagtggcttagccctcttccagtgcagaacacccagaccccagagcagggaaaggaggaggcagaggcctctgagcaggcagcagcccaggagtctgtgccccaccctcccagtatccctggaaggaagaaccggatgggatctctggagggtgattagagctgggctggtccctgtgctggttcccagactcccactggccagtacttttgcctcctgccaggaagttggtgagggggaggcagcagtatgggtgagtcagtgatgacaggagcccaagggacaaaggtcatgggtggagaattgagagacattgtttacagcagtccacctcctccaggaggccttccaatgctaatcatccctgtggtcctaaccaatctctgacccaccctttccctcttctggtaggaattatagcctctcactgacaactgtgcatctgtctgccttgtgacagtgagctcctggggtgcaagagagactgtggtttgattggggccctacaatgcctgtgactatcagcagtgataatcatttagctatacttcctactttcaaaaactttttgacatctattttaattaacatgtgggaaagtgcttagaacagtacttggcacatggtacgtgcaatgagtgttaggtttattattaatattttctgctcagactcacattattgtgagagacagggcagattttgccagtgaagaactagggatccaaacacattgtggtggggggaccagacccttgctctgccttcctactcagtatggaatcttcctgactggtggggcgggccggacacgacttgggaccccaggagagtcaaaacggcaaacacttactcggactaagagtgggcagcatctttgggcacagactgtgagaaaggaggtttcagaacccatgggcttctccagccaggtctcctggggccagtgggggttgggtgggagccgggaaggggcctggattagcccaaactctcttcagacctccagacctgcccccacaaggcggggcgggccaaaggaccgagtgaaggctccagctggactctagggagttacaaactggccacggggattagcgaagctgaaaagaacatttgcctaggaagggaaaacgggaagtgagaggctgaagataactctcctgaagtctctcgggacccacagcagaccaatgggggccggggaaggtggtgaagtcggggcatcccgacaggtcccccgccccagcctgcccctcctcccgcggcccacagctgaggcaccgccccgcccctcaccctacactgcctaccattggctagcgccagggccccgccccgcataggcggcctgccattggctgaagtctttcctgtttgcgtgcttttgggggtgggggaggcgtccctccctggaccccggcgacttcctctctcggtttgtctgggtcatcttgtctgcccgccgctggcctggccccgtctgtctctctcagcagctgtctttctcgcgcccactggccggtctctcctcttccccgcagttgcctccttctctgcctgcctgggtggccgccatgggccggaagcggctcatcactgattcctacccggttgtgaagaggagggaggggcccgctgggcacagcaagggggagctggcacccgagctaggtctctgaggtgtgagggaggcaggaggagtggacacggaggggcctagaggaggcccctagaggggcggaggggccgatggaaagggaaaggtggcctgtcctcccctcccgacaccaggtctagctgcggggtggcagaggcaaagcggtggtgaggaaggctgggaggtgaggggcaggagactgaagccaacctcgtactgaagagcagctgtcattgcaggggaggagccccagccccgcgacgaggaggaagcggagctggagctgctgaggcagtttgacctggc

SEQ ID NO: 12839 - DNA, 2246 bp, Homo sapiens
gccttttcctttgaggcttatgttacggagctcactgttcattactactgtcttcattacttaattcatttaagactgacacctgttttataatctctccttccaccctagctctgccatcattccagatggatctcatcattcatttaatagcctataatcatagttcatgtagcattcactacacaccaggcacggttctaagcattttacatatattttagttcactcaacccttataatagcacaagctattattacgcccacttctcacataaggaaactgaggcacaaaaaggctatttagacttgcctagagttacccagtcatgaagtggtagagtagggatgaggacaacggagtcaaattgcagagtccagactggcctcccagttccttataactgtaccatcctccacatctactctgcattggtgctgtggaggtgggagagagggagtacctccttcactgagtcactggacatttggaaggtctttggagagaagtcagctgaggatggcctgcattgccccttcctggaactcaatgatttgttgttatcacccatgcaaattcaccaacaaacagataaaagtcaggaagctgggatgcagctgaactgaaaacccagcagcagaaaagcaggttatagattctgctctgggtgctccatacagctccttcctctctgccccaataacctccctctctttgggaacattgctgcattcagggcagtctgtcttccctccctatgggctgtctttagaatgtgtcccttgcctatatccatattcatgctccgtgctcctcagccccctagaaactttgcacaatagattcaaaacctctggtttcctcccttcctctgtctgaaagagtgaaagaaggaagccagggatttcagggggcagccaggcagcagtatcaccacccctaggcaatcacacctagttgcagcttcatcgggaacagctcagctctgaaaacacagacctgggactctccctcccagccttctagctctcgttcctgtgagcagcttttcaacctccacttccagccgctgacaggccctcctggctccacaaggccagctaacatacccaccttccacaatccccagccctgccagacataacctgcaacaggcattcctggatcaatgcaaactccgacttctgttccaggagtctgcctctgttagaagaatctcacacaagtgtgcgtgctgtgccattgtaaatgctgtataaggtggccaggcccaatcagtccctgcaagacaccgaacagtaagaactatctatggagtgtttactatgtgccaagcaccgtcctttgcaagcactattaaccctcaaaataccaccaccgtgagattgagaccatcatgattcccgttctacagaaggaaacactgagacttcaggaggtcaggacctttccagggtcacaactgcgtaactaagttgcagagctcaacccagtggcacttccatctcacacgcagctgtctgatggtcaagagcccaaccagtcccccggtcgtttctaccgcactaaaccgctgtgtcaagctggagcagcgggctcagcagtgaaaatgaaagaacagaaggaggttacagagaagagaacggtcacggtaaattccggagaggaggcaaggacgtacacaccgagatacttcccggtcaccgttactcagcactttgtggggttcacgtggctgggggggccggggcgtggcggcccttttcgaggaatccagccctgcctgggcggtccccatctcgagcgtgggcgtgttcgattcaggcccggcggacgcatccccaggtgacccgggagggaccttgtgtctctgggggtgactgtccgtctccccgcctcccaccgtcacgcgcagtgctgatccccacttccagctggagtgcgagctgggcttggggttacaggagccgaagccctggagctccgccccacgcttgcgccagccccgccccgatcccggctcgcaggctccaggggcggggcgtggccggggcgcagcgacgggcgcggaggtccggccgggcgcgcgcgcccccgccacacgcacgccgggcgtgccagtttataaagggagagagcaagcagcgagtcttgaagctctgtttggtgctttggatccatttccatcggtccttacagccgctcgtcagactccagcagccaagatggtgaagcagatcgagag

SEQ ID NO: 12840 - DNA, 2245 bp, Homo sapiens
agtgaggagcttcacatagccagagcaggagagagggggtggtgatgcacacttctaaacaaccggatctcctgagaactcactgtagggtaccaagcggggatggtgctaacccatttatgagaactctgcccctatgatccaatcatttcttaccaggcgccacctccaacactgaggattacaactagacatgagatttggttggacacagatccaaaccatatgagctatattaacaatattacatcttccaatccatgaaccatgcatggaccattccatttgtttaggtcttctttaatttccttcaatactgttctgtggttttccatctaccagtctcacacttccttggttaaacatgtttcttttatcccttcagatgttgttgtaaatagaattgtttctttaatttcatttttggattggggcagtcttttgaaataaggacatgagtgggaaaaagcagaggatggctgttgacgcctagagaaaaaagtataaacacagagaaaaaaaaaacagaagccagaaattacataaaaaggaaggcaccgggaaagatgagaaagaacagggttgtgggagtactacacttagcaaatgcttaagcaaagtcaagctttcaagacaagattcctaaagcaaggcaggagtatcctaggacagacaaaagctcactcgacaaggcaaagagacaaacaccagagtttggaccccaccaactcccttagccagctggcaatatggtttcaccacttcttagaaaagaggaatggagaggtgtcctcaaaagccaccactaggctttcagaatgttttgtgtgtctgtgtcttggcagaatgagccaaacgtactttcttcgtgccccataagatgagacacacccagcaaaggctgtcctcatacagaactacctccaggtgtcttttatactgcaagacctgcaccaaagggttctacctatagaaatcctagcacctagacatagtcaaccaagtacatggctccctcaccctccaaccaaagatgccatatttccatcagagtggaacaaaatcccactgtgttcctaatgcctcctgcaattttgcatgtgggagacatggctggtatgtgacattctcttctacagattgtaatggattggggaaggagggggaactagagttcaggcctatctttctagaggacaaaataaatatgccttgataactgcaattatctgaaaactatttcaaagaaaactctttgtctcattctggcatttgctcaagggtatggctttccatcagtctctctgtctccatgtctcttttacatacatatgtatgtgtatatgcgtgcgtatgtgtacatacatccatacatatagacatattctctctctctccacacacactcacacacccctccaacctctgtggctctgagcgtcatgtgtgtaagacactgacgcgaatggtgagtgcctaggcaggggtcaaacaaaggctacctaccatgccagaggattgccacaaacacctcttaagcaagcatattccttggctcctcccagacacactgaatctgaatctctaggattctgatttcggagcccaggaatcctccggtgcaggagttcccaggtgactctgatgcaccgggaggctggaggcgctcggatctagagaggaggcggcacttgtgcagtgcagtcgggaaagagaggaggggctgggccggtgcctttaggcggtcaggtgttaggaccggagtacaagccgccagccgcgcgggagcaggccccgaggcagcccagccgcggggcagtaacctttagccacacttggcctccggccgccgccagagccgctccgcccccgccgcctcgcccccaccgccccgccctcctattggccgcgtccccagccgggctcgcggcctcggccaatggggccggcgcgcgccggaagccggaagcgcggcagcggcggcggcgctccccctcggcagctgttgtggggcaccatgcgaggcttcgggccaggcttgacggccaggcgtctcctcccgctgcggttgcccccgcggccgcccgggccccggctggcgagcgggcaggcggccggcgccctggagcgggccatggacgagctgctgcgccgcgcggtgccgccgacgccggcctacgagctgcgcgagaagacaccggcgcccgccgagggtcagtgcgcggacttcgtgagcttctacggt

SEQ ID NO: 12841 - DNA, 2242 bp, Homo sapiens
cacagctcactgctgggattacaggcatgagccacagcgctcaaccattctagatattaaataatttcatgtagttaccccaaatacagattatgttctgtcatgtctgactaaaataaaaatttagcttaaggaaactcctttctgcagacattatttgttctagctctgagattgtatctccatgctgcttactttaggttgcaatatgttcccaacacccacctttcaagtttttaaaatggcatttcaattttttcttcagtttgtatgctcagccacctgtgcgcttcctctacttttctaaagtgaagaaaaggaaaaaaaaatggtttctttctaatataatattaataggtctgggtttttggattaatatactgtaataagcagctctctaattgattacaaatcccactggaacactcccctgggggaatgaaggtcctgttctttttactcttccttttatcctctattccatttcagctgagaatccaccaaactaggattgagtcgaccagtgaaaggattctaggcaagacgggattgcactgatgagttccactgcctccttttcagagagacaaacgtaagcccacagactgattactaaggcaggtgtatttttatctgtgctgccttcttattcaagactctaagctagtcatcaacccaatggtataactgatagctgacgggagtttctggaatgggtgttaagtgtgagagagatgaaggcctagtgataaggtcggctctaaatgtagatttacttggattccaatctacttaccagctgtgtgcccctgggcaagttacctcttctgtgactcaacttccttgaaggagggtgtgtaaaagtgtctatttcacacggttattgtgaggattaaataccaaaagtattaaagctgtggttaaactctcagtaaacattagttatttctaccaaagttaaactgccaaatccttgagtcttgatttgtcctcataactgctgtggcatttctcctcttttaaagtcttctgaacagaagttgacgtttgcattttaaaggaactcaaatggcttacttttacgaagttggggggattatatatacacgtgacccgccagggtatgtaaacctggcggacttcaacagtctgggggtgcctgcgctcaaggggtgaagggatgcttagaaactttctcaggaagaaggtggggccttcaacgagggcggctggctacaaagaactaaactttcacacagcaaaggggagccggtctccctgcgcccgcgggcgtcgaacccaggcccagctctcaccacccaaaggcccgggtgcggctgcagggtgacgaaagcgtcagaccccggggctgctctcagctttgggctttcacccggcactctcccagacaaaggggcttctcagccaggtcgctgttttggtttgtcgtcctcccagcccccaccttcgtccccaacttcccctggcgctggctcggcggcgtccctcacatcgtccctccggccgccaccccgggcccctttgttgtctgccgtctctcccagagaggggtggggggccgcgacattccagggaggagaaaccgaggagtgaggggcaaagacgctcttccatgctctcacccgaggagcgcgccccacgacgctggccagccgttctccggcgacggcccgggccgcgcctcggcgccctcgcccgggtcctcggcacgggggaggggcgtggcgcggccggcgctctctgattggctgcgggcgtcagggcgtcgcgccgcgattgggtcgcgcagctgtctggagcgagagcgcgcgaggtggggagggggccgctggaagctgctggaagtcgggggcgggggatgcggctggggcgccggggcggggacgacgggggcgacggcaggacgggccgcgcctgtgcagggcggtcgggggcggcgggcgcgggaggaggtggcggcggagggggaggtgcgagccgggcaccgcccccggcccctccccggccttccccgcgcagagctccgaccgcgggcggcccaggggcgggcgcgccgctgcatccccatcctcgtcgtcgcccggcacagcgcgagcgggcgagcggcgcgggcggccggagcgccgaggcccggccatggccaccaccagcaccacgggctccaccctgctgcagcccctcagcaacgccgtgcagctgcccatcgaccaggtaccccgag

SEQ ID NO: 12842 - DNA, 2241 bp, Homo sapiens
gccctaaaatgtaaggactgcaagcgctatatcttattgatatttgaaagaaaggttatgtatgttttaagggtgttgataataatgtgttcaataaaataagtatgagccataaaatatcaagctaatttggaagcttcttatgctttgcacacaaaggatgtactatcatgattttatgaactctaaggactttagttctaggatgaaccttagaatatatttaaaacgatccccttaatttatcaatgaatctgaggaccacagctattgtctcacatttagtggcaatggtgagacttgaaactaggactcaggcttaatctcttttctccacacctcaggacttctccctttgtaagcaggagtgaggtccatgctctggctttccaaacaaggaaaagggcatatgagtagttcagtgttctgaactacgtatggcaatcagtaggcatttatcaagcaccattttcgttgttttggatgttttttgtagagatacaaaacaaaaaataaccttctttcatgaaggtataatatgcaggttagcgggactacctagccgtccatactgaatgggtttggaaatcccaactcttttctctacctgctctgtgataccaggcaagttaaagtcttgtgtgcctcagtttcctacctcaccgtgttatggtgattaaattaatatatatgtggagtacttgacacacagtcaagcctgcgattactgctgttcatggttttattttctctactagacaccagtaaggcacccccagaactcgctgtgttaagtagattctggttggatatagaaacacaggcaccccaggcggaatgcagatacgcctcaacatgtggattaagtaagagccaggaagcagagtaatgaagcaaaaataagacgtccagagtcaccttttaagaaaatgtgggttggtggttgcttaagaggggaggagacaatttagatgggatgtatggcgtgagcaaagggcaagaatgagcacggtgtaggcacaagtccatggaactgcttggctggatcgggatttttttgtcatagagtgttaagaaatagtcgatcagttgaggagtagaggagtgaagaccttggaaagttgccaaaagcctcgagaatttctctacatgtgtgacatgttctcaggactcaactttttcttttaggtttggaagacccgcagtaagtgtgctttagaattaaatgggtgggaaggggagctaggcaaaacacctcgcacttagcactaaataaagttcgctgttgccctaagagactgaaaaggttactttaacaaagggggcggggttaacttaacgtagatgtttaactcgtatacagatgaacattccagttgatcactctgaagctttttggctaaagcgtttgggtttagagcttccattactcattcgccttgcccaaggcctcagcaaccgacgttcgaaagccaggagaaaaggcgaatgataaagggcgctccacgcatgcgttaagaagccgccccaactcccccgcggcgttctttcttggaacaaaactagcgcggagccacggaactccgcagtttgcgtagacttgaatttcctattcctcggacgatccatgtggaatccgtgagtagtgcgactcctttacgcaactggcgttatccgaagtgaatagctaggtggcgcgtgtacgcccatagcgtagcacccataggcggacggggtgcggctgcgcagggagctgagtggaccttgtacgccgcaagcgtagcagggtgtcagacgcgccggtttctgcgacgcagttagcgcagtctgctttggtgaatacacgatttggtgcagccggggtttggtaccgagcggagaggagatgcacacggcactcgagtgtgaggtaactataaaaccccgatttgtttacattccctcccccagaaccggccccgtgcgcggcggagactgcgagtcccgggacggcgtgggggtagaaagggagaacagaaccggggagtcggggctggttccctcggggatgcgggcgctggggttcccgcagctgctgcagtcggcggcggccagccgaagcagagcgcgtggtgggcagagtgttgggcgccgcggctcctcgtgtgcggtctgggctgctgcgggccgcgggatcgggagccggcggcatccacttcgcgtgcggagcctcgcgcccccctcaccttcctgtggaggttg

SEQ ID NO: 12843 - DNA, 2236 bp, Homo sapiens
tttagtagaagcagggtttcaccatgttggtcaggctggtctcgaactgctgacctcgtgatctgcccgcctcggcctcccaaagtgctgggattgcaggtgtaagccactgtgcctggcccagtaggcactctttaagagcaggtgtcacacagtagaaactctatgtagaccatatgtagaccatgagtcacagagtgggcacactatgaagagcaggtggcagcagtaggcactctttatgtagagcaggcagcagtgagtaggcactctttatcaggagcagatgatactcagtaaacactctttatatagagcaggtggcatctgtaggcactctttatctagagcaagtggcattcaatgggctctctctcttttttatttttttgtgagacagagtctcactctgttgcccaggctggagtgcagtggtatgaactcagctcactgcaaactctgcctcccgggttcatgagattctcctgcctcagcctcccgagtagctgggatcataggtgcccgccaccacgcccggctaatttttgtatttttagtagagatggggtttcaccatgttggccaggctggtcttgaactcccgacctcagatgatctgcctgccttggcctcccaaagtgcttggattacaggcatgagctactgtgcctggccagtaggcactctttatgtattgcaggtggtactgagtaggcactttttatgtagcgcaggcaagagtaggaactcttcatgtagagcaagcagcactcagtaggcaccctttatgtacagaaggcagcccacagtaggtacactttatggagcacaggcaacactcgagcaggcagcactcaatagaccctctttatgtagatcaggaaacactcagtaggaagtcaccatatagagcaggtggtatcagtaggcactgtttatgtagagcacttggcactcagtaggcatgtgttatgtagacagcaactggtgctcagtgggcactcttcatatacagggggtggcactcaataggcactcactatgtagagcaggtggcacacagtaggcactctatgaggaatatcaggaactgagtatacagggttaatgtagagcacctggcacacagtaggcacactttatggaaagcacttggcacagagtagacaggatttagcacctggcacacagtagctgcccttcatttagagtattggcacacagtagaagtactttccatgcagcctttgtgcagagtagagactggcacacagcagctcaagtgctagttgccaccctttcccttcactcctttttggggctccctcctcttaggagccctcattgtcccccgctaaggccctcatcgaacatcccatttcccagatgggaagactgcacccaggaggggcagtactgaccaaagtcagagcaaggatgaggcagaatgaggactccattcatggttccctggctctgcccttcccctgcctggaccccatccgttccctctcatcctaaccctccacgtccccgctctgtcctcctatactgagtccggcctccagatttgcttttccagctgagctcttaatctccagaatctgacccaggtaatcctcagtggggctggattctttgttcccgttcctagcagtcaggtctccaacagggccctggactgcctggaggcaagacttgaactccatccagcagcagggggatagaggcttgtctcttccaggttgcctgattcagcatccagaagtggtacacggtgtcctaccggcccagggttagagaggagcacaggagatgatctggaacaaggcttggcctggcctggctcgcttgacacctgaactctcaagttcatgcttttatctgccacacactcagtaggtgctctttaagagcaggtgtcacacagtggaaactctatctgacccctctcggcttactctccaccttatgtgggaggtgctgagacctgaggatccagtgcctgtgctgtgtcaccctgagctggttcctctgcatccagctggtctcccacacccaggttttggccagctgcccagacatgggagcggcacccaggctgtggggattggctggcccagcccagcccagcctagcctcccacagccttccctacatcaggggccaggggaaaaaacctcccagaagaaggggagaggaggttgtgtgggacaaggtgctcctgacagaaggt

SEQ ID NO: 12844 - DNA, 2229 bp, Homo sapiens
ttttccagtgacttctctttggggaggctccccagccccttttgcaaatagatccttccagataagcccagacatactgaatcccaagtggaggctgctatggctcagggtcagacattgagttcccagtaactatttattagccattcactatgtgctaaacactggggttccaaggatgatggtctcctctcatcatggagctgccttgggaatttagacaagagctctttgagcagtgatggcctttaccccaaggaggggtacctcctgctcaaaggtaataccaaaggtgccaactaatcactgacttggcagagaacctctctcaatataactagaagtttcatcaaagtttcttaagcactccaccattgactgctctccttcaccatcccccaggttcttactcaaccacgtgcctctgtctgcttctttccaacttgtagcagcacctttcctcttctattctttgttcttgtcctggatgtcattccctttctcccctcagaggcagagaggagagggctgctggaggaagaagaaaagtgaaaaagctgtagaaatttgcttccacaataaacaatacccgaaaaacctgtacattcttttcttcaacttaaatgaagaacccaagtgtgcactcatatgaagtaaaaaaggtgcaaataggccgggcacggtggctcacgcctgtaatccgagcactttgggagggcgaggcgggcggatcacctgaggtcgggagttcgagaccagtctgaccaatgtggagaaacctcacctctactaaaaatacaaaattagccaggcatggtggcgggcgcctgtaatcccagctacttgggagcctgaggcaggagaattgcttgaacctgggatgcggaggttgtggtgagcagagatcacaccactgcactccagcccaggcaacaagagcaaaactccgtctcagaataaataaataaaaaaaatacagttcctttttttttttttttaaagaagtacaaatagctttgcatgcaatttatgaattttttcctgattctgatcgctggtgttcagtaggaaagggaatcaaaactccataaagcaaatcagcttatctgtagataaccaaagtcttctcagtggtgtctgtccctcttgtgaaagtacagctgcttgtgggaaaagtgagagacctagaatacagtgtatcttttgggggacatacctctgactgttacagaagcatgtgattaatttggaaggtagaatttcggaacatcatattttaataggaagcttgaaaggtaagtagaggaaaacatcaagcaaagcaaaatacaccatttgcagagttcaatcagatatgactcagcatttcttcattgtgctcatccccagctcctcaagcacatagtgccttgcacacagtaggggctgagggaaatattcgttaatgcattaattttagttaaaactagatacctcctaatctctcagtggcttgaactgggtcaaacagcagaggaatggggtaaataaggaaagacacccggtaaaggtagaacaagaccactgcttaataaatatattcgtttttggggttattattttgctcaaaagtctatgaggtgaccaacccagaatgtggcagttaattctatttacattttcagtgtgggatccaggttttcaagtttgttatgtgattttatgcaaaacaatatgcaaatccagcgcattctaaaaattcagtctgctttccagccgctcccctggtcacaaacaactaaggttggcgccgggctctctgggatccttcgcggaggggcagagcaggcgggggtgactggcagcggggcgggggaaagggcggtcccggaggcggtcccggggcggagcccgtgacgcgcggagtcggccggcttaagggccggacctcagcgtctcccggagtctggccgcagtcgcggcagtggtggcttcccatccccaaaaggcgccctccgactccttgcgccgcactgctcgccgggccagtccggaaacgggtcgtggagctccgcaccactcccgctggttcccgaaggcagatcccttctcccgagagttgcgagaaactttcccttgtccccgacgctgcagcggctcgggtaccgtggcagccgcaggtttctgaaccccgggccacgctccccgcgcctcggcttcgcgctcgtgtagatcgttccctctctggtt

SEQ ID NO: 12845 - DNA, 2228 bp, Homo sapiens
tgccctcagtttctttacctgtcaaatggggtgatcacagcggtgctacctggctaggtaagagtgcaactgcagttactggtcattgctgactcttccaggcccagaaagcagcaggccagtggctggctctgggcctgtcctccggatcttcctcgtgatccctcattccagccaccctgctgcccgcagggaccaatggcagcgtagggggtgagtgcctgcccagccctgtcctccaaatgcattggaatcaggcccgggccgcctcctaaggagaacgctggaaaggtcggccaaggagagcagaaaacaagcagtggtggagtcggcagtggggcagaggagggggagctggaagggaaggaccccaaagcagaagcccgcacagtaggcacagcgcacccaagaagggtccaggagtctgcagaaacagaaaggtccccggcctcagcctcctagtccctgcctgcctcctgcctgagcttctgggagactgaaggcacggcttgcagcttcaggtcagccagagaatggggttgtgcgtgcccccaggccagcgctggcagcgcctgggggagcatctaggaccccggggtgcaagtaaagggcctgtaggtgcttctaggaaggatggggacctggcgtgtggattttgtcctccctgggatcctggggtgtgacggtgagacttaaccgacaaggcttcgggacatggattaagaattagctgtgtccttgaatcacacgtgttaagaccgcggcggtgtttacagttagagacttctgaggccccaatggtgtgagttgagcactcccccgggccctggaacgtgtttttaagaccgaaagaggctttggggcttggatttaggacaagctggagcaagaatacagcccgcgcgggccgtgggtgtggactgggatatttttggtcccccggggtagagatcctgcacgccaactagggctcgggtcctgatatcttgcgagccacgccccaaggctgcaggacacgtgtgtttcctaaaaggagagggggtggggcaaggcttggttgtcatggagacagcggacgaccctggcgggccgttctagcacccatgtctctttggccgtcgcctctccggtccggttgcctctctatggtcgtggcttctggaagacggccggcctcggctctgcgggctgaggggcttcgaagtagacaggagggaagaggggcggggcctaggtcctaggggggccggagtgaaacccaggaggtggcgaccgagccaaagcctgagggcggggcccgtggccaggatagaacctgagcctgggaacttgggctaggcccggaactggggtggggcttgaacggattggggagggctctagtttcgggagggtggggcgtgtgcttattgcgggggggtggggaggcatatgtctaacctagggggtggggcctggctgagaggggcgggactcggggagagggcttgtacctgtgggctgggctagaagcataacctaagggcggggcccagtgagtggtgaaaaggccacggggtagaggcaggaccaggaggaaaggggacaggacgtgaagggtaattcggggatcgaggatagaggctagatgaaggcatgtggcgaggcctgacagtgaccgacaaggtggacatgctggctctgggggcggggactgttgtaagattggcagggaaggatgggctcaaaaatatggaatagagcggacccagggtccgggggcggagcctggccaggacctggccaatcccaggcctggggccctggtctggttcctagttagcgggcgggtgtaaaagcctggaaaggggcgatgcctggcctgaggagttgaccaatcccaggcctgggggcggagtctgactcggagcgcgttcccggactcgcggggggcgcagagccgaggcctgggggcgcggctcgctgtagaggcgggggcggtcgtggggcggagcgggtcgtggggcggggctggagcggcccgcggcctcagctctctctgcttccccaggatgcgggctccgggtgcgggcgcggcctcggtggtctcgctggcgctgttgtggctgctggggctgccgtggacctggagcgcggcagcggcgctcggcgtgtacgtgggcagcggcggctggcgcttcctgcgcatcgtctgcaagaccgcgaggcgagacctcttgtgagtgttg

SEQ ID NO: 12846 - DNA, 2226 bp, Homo sapiens
actcttctttcctgcccttctgtgctcacattcaaacaggctaagtgctacaaggctcggtggcctggtctggatgggcatctgacggggtgggggtgcttccctgaagcaagggtgagtgtgaaccaggaagccagtggaggagggctcgggtggagacccgggagcatgacagtgagctgcggggcacgacagcaagctgcagggcactacagggggcgccaggtatgcagggctatcctcctctgagctggacttgggttcacctttgtggtccctagtgtccctgtggtgtggcctccaggaagtatttgaccacgcatactttcgtaggcacgtagttaatattttgagctctgtcatctatgcatatttttcttctgtcagagccagtttaataatgtttgttggccaggcatggtggctcacgcctgtaatcctagcactttgggaagccgaggtgggtggatcacaaggtcaagagatcaagaccatcctgaccaacatggtgaaaccccatctctactaaaaatacaaaaattagctgtgtgtggtggcgtgcacctgtagtcccagctacttgggaggctgaggcaggagaatcgcttgacctgggaggtggaggttgcggtgagccgagatcacatcactgcactccagcctggcgacagcacgagactctgtctcaaaaaatagtgataataatgtttgttaaataaatgctttgttttctctgtaatcttacactttctacattaaaaccccagtgggtttcttcttttggtgcattttatttttgttgtttgctgattcacgcagtgtcgcatgactccctggggtgtagttggggggaaggcttttcagtaaacactcaaatctaaacaggtatcccaagaatcaccagtgccactggaacccctgaatcttcagattagggccagtctgtcaccaatcctgggcacacactaactggtttgttgaccctatgcttttagttccacagtaaataccagaactgtgatcaatgtacaaaagaaataatggtcaacagaagtcattaacaacttgaactgccgggttcaaatgattctcctgcctcaccctcctgagtagctgggattacaggtgcccgccaccacgcttaatttttgtatttttagtagagaccagtcatcatgtgtggatattgcggactgattttttgttgttgcttttcctcattttggaagttgtttaggacggggcatcttggtgtgtcctgctctcgcctctgatgcttccttcccagtgggagtgggtgggaatactcagagacacagaattgtgcccacgctgatgtgggtgtcacagccactgtccccaagaaaacaaacccacccacacatattcacgagcacccccgtgtctgcagtgttgctgccatgccgcgttcctgttgccttcgttatcccttccatgacctgcaggcccttgccaccctgaccctgtggcctcgccgcctcctgccctggctgggccctctgtttggatcctccttctctgagtctactctcgtcctccctcctctcctggcttccatcttgtgaggcccctactttgtcctcttccttcccctagcactccctttctgatgtcctctttcagtgattctcattctctgtccctgctgagcgtgggctgtaggagagcaggaggtgtctgtctggttaaggctgcttcctgggcactggagtcagcgtgccctgaatgagtaaatagacgagggatccccagcctttgatgggtcaaacagtaaagcagatgaaagatgtgtatgtttcatgggtgtggtttctgcttctgcccccatcacggagctgtgggtctctgtgggacgtgctgtcctgcctggccaggctctcaccctcaccagcagtgcgtgtggaccttctgctgtgtgcacagatgggaataaaaggtcactagcatggtgctggtcttaccttagacgtagagcttccaccgggccaatgtgtttctctatgtatgaggctgggtgcaaggcctgctggattcagctcatcacttaggcctgttctttgccaggttacctgtcctgctgccgattcctggatgacaatcagatcgtcaccagctctggagacaccacgtggtaagtacctgacccggggcaggcagtgccttgagaacccacagcccctggcacattcctctgtgaacatggag

SEQ ID NO: 12847 - DNA, 2225 bp, Homo sapiens
agctcaacaattccaaaaccaaaattgtgagtcagtttgttctttctttccttctttcctttctttttctttttctttctttctttctttctttcttttctttctttctttcttttctttctcttttctctttctctttctctcccttccttctttccttccttcctgcctcccttctctctctctctctttctccttccttttttttttgagactgagtcttactcactccctcgcccacgctagagtgcagtggcacaatctgggctcactgcgctgcaacttccacctcccaggttcaagcggttttcctgcctcaccctcccgagtagctgggactacaggcgtgcaccagcacacctggctagtttttgtatttttagtagagatggggtttcaccatgttggccaggctactctcgaatccctgacctcaagtgatccacccgccttgacctcccaaattgctgggattacagacgtaagccaccacgcctggcccaaaattatgagtcttttcaaaaattttatatcaaaaaggtgatatttaatgtggaatttgagtgcatttaaataagatagtgacttcgtagaatagggactgcagagtaagagtgttcagacccattcgagtttaatatagccctacctctaagaatcctttctgttcctcactcaaatgaactaattgctgtctttcagttcctctaaaaaccttggggtccgtggcagggtgtgggcttaggactcacctgattacttgtcttcccaggtggtctctgggctctatcaggaacaagccaggtatgatcatccttttccccagtccttagcgtggggtctggtatacacacgcacacacaacttcagtaaatggtgaatgaaacgaaaggcagtcaagatccacctgttgaatgaacgtctatcaggagcactgtcatccttcttgcttccttcttttgcatatgttgtttgagctgctcattcaaccaaggagagagcatactctaccttgggcagtgtgccagccttgcacagagggacagatgattcagcttgatcaggctgtgacagagaaaagctcagggtctgagagcacacaggatgcgactaacccagactggagggtcaggagagtctccccaggggaaatgaagttgcatccagaaggattcctgagaataatgattagcctgatgagaagcagaaaggttgggagtggagggaagtgggtttctgtgagagaaacaatatggacaaaggccccaggcagaggcaatagtattccagataacgaaaagcattttagagagtctagtttagaatttgtgaaggaggtgacaatgctgctaatgagattgaaagggagtcagatttgtaaaccatttaaggattgtcttaaggacagccttgaggagacactgaaggttttaacaggagaatgacatgatccgatttaaattttaaaaagataactctgtcaactgtgccaacagtgaattggatgtgggcaatgatgaactcaggaacagctgagagtctattgcagaagccaaggtgagagatgatggtggcttggactttggtgctgggactggaaagaaatgaacaatctgatatacaactggaagaataatctctctggctgtgatgtggaaggataaggacgtgattggacaggcagggatggttcagtaacgagctaggactttattgtgaagggataaaggggaagcttttaacattttaatcatgggactgatccattccgatatgggtttatataaatagaccgcttggcggagggtggtgagaagactgtcaggcagtgcacaggtaagaactgagccctagacggggcaggagcaatgaatgtggggaggcgcgggagacgggagattggtttcggagccaggtacggagccaagcagtcagagagaagcaaaaattgacgcagcaccgagaacagctgctagtggagagggggatgggcgccgccggagccgccctcgcctcctggcgccgggggcgggaccagagcacgcacggcgcgatgacgcagtgcccgagccggcctcgttctggctgccgccgtctcgctgaggcggagtaggatgaggcccgcggccgtggctccggcgtcggcgggggcagcagcagctgaggcagcagctgaggcagccgcgacggccgcgcccccccccgctgacctggattaggcccag

SEQ ID NO: 12848 - DNA, 2218 bp, Homo sapiens
gtctcgtcagctaaagatggagccggctgctatgggcctcttctctccttggccgaccatctcttgcaggtcggggcgggcaagccagcagaccctcggtggcaccagccacaggcagcaaagcccggggcaaggagaggctgactggcagggcccgaaggtaacaggtggcaggggacaaaatcaagacgggcatgtgggtgtcccaatttcctggaccagtacaggcccaggtgccagctccatccctggggcccctgcctcctggctgactgctgcctggcaggttaatgagatgctgggagaggccattagcagaggctgcagcgagagcctggtgcccggggaggctggtggtaattacagcagctcccttcccctgggaaatgaggtatgcctttcccaggcattgcaggcggggacatgcctggagtccccacagaactcaaggtgctgcaagtttggccataaacagcagctggggacccaggatgggcccagagtgcgtggtattcagaggaaatagttggatttagggaacaaggtcaggcttggtgggggaagcatcctggagccacattctggctctgatcccagtctgagacccttgggctttggcttctgccaggagtttctttggcaaggagatggaggcccagaggaggtggaggcccctcctctctggtcctgccatggctgctcctctctgctgagggctatggggctctagggagagtctgggtcacccctgggatttctccactgctcagtgtgaggcctaaaccatggggtcccagctcagccttcctcactggctctcaactccaccccacccctctattcaggcagggggacatggctctggagtgaagtggggtggggcgtgccatgagctgtgtttctacaggtgggatatgaaggaagacaaggaggagctggaaggtcaggaggtaggtacttgggtataggatggggcaggctggggacgcgagccctggattcatcagccaccggggctattctcttgtttcagggaagccaaagcaccagagagactcccagtgaggaggagcaagcccagaagcagagcgggatggagcagggccgactggggagcgcccctgcagccagcccagccctggcatccccagaggggccgaagggggagtcagtggcttccacagccagctcagtcccctgctctccacaggagcctgacttggctcctcttgacctctccctaggaggggctggcatccctgggcccagggagagcgggtgtgtgctcggtctgaggcctggggcccaggagagccctgtgtcttggccagagggctctaagcagcagcccctggggtggagcaatcaccaggctgagctggaagtacagacttgccctgagccacagagaggagcagggctcccagagcccggagaagacaggtctggcaagtctggggcccagcagggcctggccccgagaagccggcccacgagaggaggcagccaaaggtcgagaggcacagcaggtgtgaggcgcaggacagggcgccctggcccggcaggaagatgctgaacacagctcctgggagctggggagtccccggggagaggaaaagggaatcactctgttaaaggccctccgcgtgatggccatgtggttgccggtggcttgcgccattgtcactgagcagtgtggcaaactctccagcatggcgaccttgtgagggcaaggagtggcctccctgcacctcacacgctcatctctgtgcacatgtgtgttttcacgcacgggcacagcccctggtgtattcctgtactagtatctggcatctgaggctggtgcaccctgacctgggcctactgctgcccaggccacaagccttctccactatgatgagagaacaaggcttggtggcacccagcacctggctctcctggctccccgtcacccccccagggcctggcctccctctccagctgcaggctttcacctcttgcctgggctggattcccccagtcccagattcccaggatgcccaaccaggggaatcccagtaaccatgcgccagcctcctgcctctcctgagtggtggctgaggcctggaggaggagaggccacacagctggcagggtctggcctgggcaaagaagagtagagctcacgtcttcttggtgaaaaggaggatctctggaaagtcctcctctctgaaatggg

SEQ ID NO: 12849 - DNA, 2212 bp, Homo sapiens
tcagacttttctggaactcctgggctcaagcaatcctcccacctctgcctctgaagtagctgggactacaggtacttgccaccaggcctggctagctttcatcttttttgtagagatgggacatcactatgttgtgaaggctggtctcaaactcctggactcaagagaggcttctgcattggcctcccaaagtgctgggattacaggtgtaagccactctacctggacacaacattttatttgaaataagaaaaattttccctcactgggaatgctgcagttgaactagttcaaatccataaagaatggaagactgcccagtggtcattcattcacttattaattctagatgttaaattttctagggtgggggaatgtgctcctacattcaaggcattcttgaatgtagccaaactttgtagtttagccaaacttcatagctaatagccaaactttgtagtttagccaaactcttctagcagcaaaacccatgacactggaactctgttcttcacactggtcatttgtaatagaataacagagctttagcactagataggttctgaaagatcattgaatctaatcctctccctttgccagtgagaattctgaagcccagatttgttgatttgtgatcgatagtgtcaaagacaggcctgaaacacagatgtcctgggtcctagaggtgctgtttgcccctctccatatttcttttgttccagaaaacccttctccaaaactggccctaataatcagaggggaaagccatggcccctgccttggggacagcatgggttggcacagaaaagaggtttacaattcagcaggaagtgttgtgcgtgcgcgcgtgtgtgtctgtggaggcgcagggagggtcacctgagcttgccctgggtctggtcctgggctcagtggcaaattcaacgctgggcaggtggcctgaggacaatgacggtgccagctgtgagtcagacttcctttattcataaaatcatgttcctccatgcagtgcttctcaacctggctgcacgtcaggagccacctgggtagctttgtaaaaaccccaatgcccagttggtttgcaccccctgagattctgattaaactgttctggagtccatctctctctttttattatctatctatttatttattttttaatttggcggctcctctgggacttctcatatgcagtaggggttgagaattgctggtttctttggccagatgggaacatgcaggccaatagttacgcacaaacagagcagcagagcaggacggtgctaaggttggaaagggtgagtcatgaaagttcaggaaatcagaataggaaggggtgagaatcctctcatctgggcttgtggggcaggagagaagagcccagtgggcaaggtccagtgagtgtgcttagaactgggaagatgaggggaagggtaagcgctgggcggcggtgggcaagatggacgagattaaacgggagcgaggatttcagcgagagctttggcgacacggaaggctgagaatcggagggagcctgtcgggcgaaagcgaaggcggctgctgggcaggcagccgaatccggctggagagccgagctggtgagacctacaggaagtgaagggagtcgctcagggcgtggcgcaacgagactcttagaagaaactctgaggcagagatggggggcctccgcccatacggagacacaaggaagtccacatgcacacgcacgagcgcgcacatgaacacgcacaagcacacaaacgcctcctccgggcagggcacacgcgcccgctgcacaggccgaggccctggactcggaggggactgcagagccgacccacaacccgggccccgatgcccctcccggccgcgcccctacgactgcttgcgcaacaggcggcggctccagtgggcgcccgccgcgcgctgccggagcccagcccagcccggcgcgcccgggaggagggagcagggagcggggaaggggtgtgtcccggctgcgtgctgggactgcgagggtctgggaggggcgaggcgcgggggcggggccgcggcgcctataaagtcgccctccgcccggacgtaaacaaacctcgcctggctcccagctggtgctgaagctcgtcagttcaccatccgccctcggcttccgcggggcgctgggccgccagcctcggcaccgtcctttcctttctccctcgcgttaggtaag

SEQ ID NO: 12850 - DNA, 2206 bp, Homo sapiens
tcacacctcttcctctgaactccatttttttcatccacaaaaggacattataaaacaccctgctggtgtttaatctatgtgtctatcaaatcagtcatatgaagtctctaacatgcacgcaataaacactatgtaatgttgttgtattgtttccagaccagtaatggctggctccatggaggcagctttatcagtcccagcattttccataaggcaagcactaactatttattggacacatgaatgaattaatgaatgaccaatgaatgaacatgtggctggccatgggcaaattacttaatatctgtgtgccctagtttctgtgtgtgtgtgtgtgtgtgtgtgtgtgtgtgtgtgtgtactcacccaggatggagtgcagtggtgcgatctacactcactgtaacctctgcctcctgggttcaagcaattctcgtgcctcagcctcccaagtagggggaattacaggtgagcagcaccatgccctgctcattttttttttttttttttgagacggagtctcactctgtcgcccaggtgggagtgcagtggtgcgatcttggctcactgcaacctccacctcctgggttcaagcgattcttctgcctcagcctcctgagtagctgggactacaggcatgcaccaccatgcccagctaatttttgtatttttagtagaaacagggtttcaccatattggtcaggctggtcttggattcctgacctggtgatccacccgcatcggcctcccaaagtgctgggattgcatttttttttttttttttgagacagagtctcacttgttgcccaggctggagtgcagtgcaatctcagctcactgcaacccttgcctcccaggttcaagcgattctcctgtctcagcctcctgagtagctgggactacaggcatgtaccaccacacccggctaatttttgtatttttagtagagacagggtttcgccatgttggcctggctggtctcgaactcctgacctcatgtgatccacccaccttggcctcccaaagtcattttcgtatttttattagaaacgaggtttcaccattttggccaggctggtcttgaactcctagcctcaagtgatccgcccgcctcgcctcccaaagtgctagaatcacaggtgtgagccatgcacctgacccagaaatttattttaaacagataatatatacatatggcaaatagaaagttaaaagagaacaaagaaccaaagttcacaatgaaaagtaagcctgcatgcctaccctaccttttcttcaggtattcaatgcacaagcatacgatgcatagatagctctattatttttccaattttacacatgaagaagcagaagcactgaaaggttatagaacttagactgtgctaagatttatcagtcaggagttttgtttcatttgtgtatatcagggcttcacaacctttacgctattcggcattttttgcagggttttttttgggggggtagtggcagggctgggggtggaaagggtgtcctatgcaccgcagaatgtttagcagcattccaggcctctactcactagatgccagtatcgcctctccacttccccagttatgacaaccaaaaatgtcttcagagattgccaaatgtcgtggtggtggagggatgtcagggcaaaatccctgataaatggagagaatgtggtatatccacaaaaactccctccaaaaccactggtgtgtatgactatacatcagaccacccctttcttttttctgtgttttacacaaacagtagcacgaatacaccccgctgcgggtctacttttcttttcttacaccactttttggtgatcattccacttcattgcttacaggcagaaaggaacttctcttaaacagaactgaccgggagaagtggtgagctgcccgtcctaggggtaagccagcgagcagacaggggcttccagggcggcggggcggggttcccggggcgagcctccgggaaacttcccgaccagcctctgctcacctcgcggtcccgaggcgcagtggaggggatggggcggggcggggcggggccgcgtatcgggcccgcccccgtacgtcacgtcgccgcggccccgcccccgcgcgggcacctcccccttccccggctggggcggctggagagccgggagtcgctgggtgcgtggggctgcctcgccgcgtctcgccacggtaggtgg

SEQ ID NO: 12851 - DNA, 2204 bp, Homo sapiens
gggattataggagtgcaccaacacatctggattttttggattttttgtagagacagggtttcaccatgttaggtcagactggtctccaactcctgatctcaagtgatctgcatgctccggcctcccaaagtaccgggattataggagtgagccaccacacctggcctctaggccacgttcttaaagctttgtcctgtcaccatttatctgccagggacaaaaacaaagaaacaaacagaagtaagccgatatcaagtagaaaaaaaagcaaaacaagttaagattctattatgctaggaaggtaggtatagataagttcctataggaccctaatggtcaggatattgaatttcgactttatcctgaagacaatagggagtctttgatatggagacagactagaaatgtaaaatcagtctctacatttcagaaacaaggctgagtgccgtggctcatgcctagaatcccagcactttggaaggccgaggcgagcggatcacttgaggtcagcagtttgagatcagcctggccaacatggcgaaacttcgtttctactaaaaatacaaatagccaggtgtggtggcaggcgtctgtaatccccggtactcaggaagctgaagcaagagaattgcttgaacccaggaggcagaggttgcactgagccaagatcacaccattgcactccagcctgggcaacagagtgagactcagtctcagtaacaaaatctaggctgggcgtggtagctcacgcctgtaatcccagcactttgggaggctgaggtgggcggatcacctaaggtcaggagttccggagcagcctgggcaacatggtgaaaccccgtctctactaaaaatgcaaaaattagctgggtgtggtggcatgcgcctgtagtcccagctaccaggggaggctgaggcaggagcatcacttgaacccgggaggtggaggttgcggtgagccaagatcacaccactgtactccagcctggctacagagtgagactccatctcaaaaaagaaaaaaaaaaaagaaaatctattgacaagattgacaagagttcattttaaagatgattctctacacttggagcatgggatcttgcctgtcagcaattttcagccgtctccagattagtaactgtgacttgccaccctggttgatgggctggcaggaaggagtgtgtcatatcagagattgccacagacacccagggcaatgtgatttgtcacttaaagaggacggcagatcaagagcatctcatcctccggctgctgagtcatcctgctctggcagttatttaaacagaaggctccaggagacatacaatcaacactccactcagacaatgcccagacctccagaaaccatgtgtcaagctcggattgccttagacaggtgcaatttaagaacagctttcatcctcttttctctcatattgtcacactatgtgttctgacttctggctcctttcctcacaagaagctcacccagctggaactcttatgggaccttggcaccagagaccacaaattcctctttgaagttttctaacagcaacaatggtatttctgacttggctttcttgtatttctctcacgttaacaaaattggttcagcatctaccatgggctacatgctgagctacaggtaaggtttggctaaaggatgaataagaacccctccttgtcttcaggagtttgtctagcagaggagtctgtcatgtaatcaggaaactccagtacacaacgtgatagctctaagacaggtatatacaagatgatgttctggaccttaactgtttggggagtactactgcctttgtctaaaagccatcaccctttttatatgccatttgggaggaactggggggacgtgggaggcttcaaagggttatgggaggatggacattttaaaagggcttttcttttctttttttttttttgagacagagtttcgctctgtcgcccaggctggagtgcagtggcgcgcgatctcggttcactgcaagctccacctcccgggttcacgccattctcctgcctcagcctcctgagtagctgggactacaggcgcccgccaccacacccaggtaattttttgcatttttagtagagacggggtttcaccgtgttagccaggatggtctcgttctcctgacctcatgattcacccgccttggccttccaaaatgctgggattacag

SEQ ID NO: 12852 - DNA, 2200 bp, Homo sapiens
tgtctttttgggtttgaaagagctaggatgtgcgtctatgtgcttggggtgagccctgggcacttcgctcccctgtggcaacttgtgggtacggtttaactggaccacgctgagcttctgcagcgttggaacctcaagtttggggggactgggcgggcagggtcgcctgccacgcaggcccgagaaagaggagagtggtggagggggcgttctcacgcctggccccagggcacacggctgcgcccgccgcccggaaccccaccggggctgcaagcgtcctcggggtgggttgcggtgggagtaggggagctggggtgcgtggtggtaggtggggtgcgcggccgctccacctgcgcggaagggcagccgggcaaccggaccccgcggccacccgggggcccccagctccgagcatcccgccttggtcccggcggatcccagcctttccccagcccgtagccccgggacctccgcggtgggcggcgccgcgctgccggcgcagggagggcctctggtgcaccggcaccgctgagtcgggttctctcgccggcctgttcccgggagagcccggggccctgctcggagatgccgccccgggcccccagacaccggctccctggccttcctcgagcaaccccgagctcggctccggtctccagccaagcccaaccccgagaggccgcggccctactggctccgcctcccgcgttgctcccggaagccccgcccgaccgcggctcctgacagacgggccgctcagccaaccggggtggggcggggcccgatggcgcgcagccaatggtaggccgcgcctggcagacggacgggcgcggggcggggcgtgcgcaggcccgcccgagtctccgccgcccgtgccctgcgcccgcaacccgagccgcacccgccgcggacggagcccatgcgcggggcgaaccgcgcgcccccgcccccgccccgccccggcctcggccccggccctggccccgggggcagtcgcgcctgtgaacggtgagtgcgggcagggatcggccgggccgcgcgccctcctcgcccccaggcggcagcaatacgcgcggcgcgggccgggggcgcggggccggcgggcgtaagcggcggcggcggcggcggcggcgggtgggtggggccgggcggggcccgcgggcacaggtgagcgggcgtcgggggctgcggcgggcgggggccccttcctccctggggcctgcgggaatccgggccccacccgtggcctcgcgctgggcacggtccccacgccggcgtacccgggagcctcgggcccggcgccctcacacccgggggcgtctgggaggaggcggccgcggccacggcacgcccgggcacccccgattcagcatcacaggtcgcggaccaggccgggggcctcagccccagtgccttttccctctccgggtctcccgcgccgcttctcggccccttcctgtcgctcagtccctgcttcccaggagctcctctgtcttctccagctttctgtggctgaaagatgcccccggttccccgccgggggtgcggggcgctgcccgggtctgccctcccctcggcggcgcctagtacgcagtaggcgctcagcaaatacttgtcggaggcaccagcgccgcggggcctgcaggctggcactagcctgcccgggcacgccgtggcgcgctccgccgtggccagacctgttctggaggacggtaacctcagccctcgggcgcctccctttagcctttctgccgacccagcagcttctaatttgggtgcgtggttgagagcgctcagctgtcagccctgcctttgagggctgggtcccttttcccatcactgggtcattaagagcaagtgggggcgaggcgacagccctcccgcacgctgggttgcagctgcacaggtaggcacgctgcagtccttgctgcctggcgttggggcccagggaccgctgtgggtttgcccttcagatggccctgccagcagctgccctgtggggcctggggctgggcctgggcctggctgagcagggccctccttggcaggtggggcaggagaccctgtaggaggaccccgggccgcaggcccctgaggagcgatgacggaatataagctggtggtggtgggcgccggcggtgtgggcaagagtgcgctgaccatccagctgatccagaaccattttgtggacgaatacgac

SEQ ID NO: 12853 - DNA, 2193 bp, Homo sapiens
gagaaccccactctcaatcctttgtagaccaggtcattcccgccaggctctgtgctaacggaggagagtaggttattagtcccatttaagagccagagaaattaaggcagtggagagtagcagggctactggtttaaaaacactggctctgtgcctgaatcccagccttgtcatttgctagctgtgggaccgcaggcaagtgccttgatttctctatgtctgtggataatgatggtatctacctcaaagctatgtaaagaattaaggaaacaatagcccaacaccacacctgcaggaaggaagcaagtttattattactcaataaacattggtggatcctgatgacattctctcagtcagctttagcagtcttaagagactgcagaggatggagaacccaaggttagagccagatttcttctctacccagttcctcggggccaaaaccctgacaccatgcttaactcctcttttatacgccatagtccgtcagcaaaccttgtcttcagtatgcgtccaggagtccaaccattcctgccacctccaccgtattactttcatccagactgccatcagctgtcacctagattattgcaaaagcctccttgctggctttggggcttccatcctctctctctcgccaatccccagtcaactcccaacaggcagcaaagcttaggttacttctcagttcaaaacccttctaggtgtgctagaattaactgatttatttactcaatgattatttattattgagtgtctactatgtgccaggtactgttgtaggcattgcagataaaatggagaacaaaacagacaaaaatttctgcattcatgaagcttccgttctcatggagggagatggttaacaaacaagtgtatgagtaaaacatatggtaggttaggtgtcatgtggaaaaatagtttagggaaggcggggggccttggattttaagtagggtggtcaaggaggtctaacacacaagataagggttaaataaaaggccaaacgtaggagaggtgggagccaaagagctacccagaagaagagcattctagataaaggctcagtaagtgcaacggtggaagtattcctggtgagtctgggacaatagtggaaagtcaaagtgtgtgggaggggagatatagagccccatgcccccctcccacacacttcagaggggaaaagggggcaggattgagtcctgtacattccccacgttttttttttctctggagattggaagccattggagggtctaagcagaggagtgatgagttaagctgctgtgtggaagtccgtaaggaacaggggtgagtcagagaccctgaatggagccgttgcaattatccagatgagatagagtgccttggatcaggaagggaggtagcaacagaagcggccaataaagttcaaagtcctcagccccagtcctcccgatgggggtctcacctacccctctcacctcaccttgttcctccctgcatccccaccccaccggtcactgctaggcacatagaagcatctactaagcatgtggtgaatcaatgaaccccttaatgaatggtccacccctagatcatcagcatcctttttaacgctaggcatatagtctgaactcaacacatgtttacagatggaatgctgcacagtcctgccaagtccaggcggttattcctctccacagccgaaggaaactaaggctcgggtggggaagtgtccccctggggtctctccgcttaggctgcaggctgggcatcctttttcaaactcttttagcacagcgaagtcgagggcactgggtggagggtgcttgcttgccctcagggtgagtcacagtgacctcagaggagtttccccaaaacgtccccgccctgtgatggggaaaagccggaatctctcggtcccaggtggtcatgtggcccaggccggacaagcgtcccgaaagccccgggagagactaagaagcaatcctcccacgcgctttctcccaccctcgggccactgagacggagggacagagggccgccctcgcgcggccgaggccccgcctcccgctcgcccgcccgcgcctccagcggaagccggaagcaaaagcgggtcctgctagccccgcggctccgaactcggtggtcctggaagctccgcaggatgggggagaagatggcggaagaggagtgagtgggcttttt

SEQ ID NO: 12854 - DNA, 2192 bp, Homo sapiens
tcagaaacatagcaagccagacatcacgcttcctttcccttgtgtaaggacagtctccctcctggacaggagacacggattgttgtgggggaaggacagacagtaacccatgtggcatgcccagtgacctccctaagaacaggggagctgtgtgatggtggtgaggggataggctcggggattcccctcgcacctgtcacgccatccacgctgtcacaccggcggctccagcctgggctcttcagggaaacaagggctctcctcctcccacttccaagagggaaggggcctcctcttctgtctgaggtgctcctccctcagggctggctgcaggagggctgaggcgggaggatccctggagcagttgtcatctgccctttcttgagggccagctgtgtgccaggccaggcaggggaggctctgatcacccccacacacaaggaactcaacatctggtgactgaggacaagcgtcacagtcccttccctgtaagggctcatagcctaagtgggggatcgaagtacctaaaaacctggtatgacaggcgccgtggggtggggggtgccttctacttgggatttgtgcagtgaattttggtgttacatagttttggaactgttgtacgggtccttgctatttttggcaaatgatgctggtctttcatttacagaggggctgcgtgcaaagtctcctttgaaaaatttatgtgagcaaggaaaaggggagaggatctcaaagactgggttacgtagatcacgttccagggggtgcgcgacggcccacttgggcagggggcccagatgtgggagcagctggctcagggcctcgctggcatttctcagagtcttaatgttggttttctgttcggtgagcaggaagcaaggcagcgaagacaacctccagggcaccgacccgccccccgtgggggaggaggaagtgctcttgtgagaggcagtccctgcgtggaaagttgctgggcccccgcccccggctcccccgcacgcatgcatccactgcggccggaggaggccatggagcccgagtagctgcctggatcgctcgacctcgcatgcgcgccgcgtcgcctctggggggctgctgcaccgcgtttccatagcagcatgtcctacggaaacccagcacgtgtgtagagcctcgatcgtcatctctggttatttgttttttcctttgttgttttaaaggggacaaaaaaaaaaaaaggacttgactccatgacgtcgaccgtggccgctggctggctggacaggcgggtgtgaggagttgcagacccaaacccacgtgcattttgggacaattgctttttaaaacgtttttatgccaaaaatccttcattgtgattttcagaaccacgtcagatataccaagtgactgtgtgtggggtttgacaactgtggaaaggcgagcagaaaactccggcggtctgaggccatggaggtggttgctgcatttgagagggagtagggggctagatgtggctcctagtgcaaaccggaaaccatggcaccttccagagccgtggtctcaaggagtcagagcagggctggccctcagtagctgcagggagctttgatgcaacttatttgtaagaaggatttttaaattttttatgggtagaattgtagtcaggaaaacagaaagggcttgaaatttaataagtgctgctggaaggggattttccaagcctggaagggtattcagcagctgtggtggggaaacatttctcctgaaagactgaacgtgtttcttcatgacagctgctcaaagcaggtttctgagatagctgaccgagctctggtaaatctctttgtcaaattacgaaaacttcagggtgaaatcctatgcttccatgtacattacatggcttaagattaaacaaaaacatttttcaagtctctaactagagtgaactctagagcacagtagttcagaaactatttagagcttccaggatatatttcacagcttcaggcatgtgatcagttagagccgatgaaacctatgcccgcctgtatatatattagcagcttagctagttcataacctgtatattctaaagactgctaaggttttgttttcattttaaatcctagctgattgttgtggtcaatgaaatacccagtttctggagggccaggtgggaaatgctttcactggaccaacacacaaatgat

SEQ ID NO: 12855 - DNA, 2189 bp, Homo sapiens
taaaaacaggaagtgcatgagcactggtgaggggcattgtgactgcgttgaacacttgcaactttgaggtgaatgaatgtattggctcctggttgcaatatacaatcacacgttgtgctactttgtattgtcaggagatgtcctggactcccacagaaactcagggctatggaatgaaggtaattttagaatacaacaagagtcacagatacatagtctgggaaagcaaaacttaggagctctgagagttgtacaactgtaatgcatttagacacatttatatatcaaggggccaaagtaacagtttttacacataagattcctgattggtcgggcgcggtggctcatgcctgtaatcgcagcactttgggaggccgaggcgggaggatcacgaggtcaggagatcgagaccatcctggctaacacggtgaaacccgtctctacaaaaaaattagccgggcgtggtggcgggcatctgtagtctcagctactcgggaggctgaagcagaagaatggcgtgaacccgggacgcagagcttgcagtgagccgagatcgcgccactgcactccagcctgggcggcagagagagactccgtctcaaaaaaaaaaaaaaaaaaaaaaaaaaaaaaaaaaaaaaaaaggttcctgataattcaggggttaccaagattctactactcactgcagctaataaaaaaaaaaaagaaagaaagaaactggtctctgtcctatttcatatgctcaggtacaacttttccagagaagaagaggaggggggcggggaggagcaggaggaggaggaaagaaggaggagaaggagaaggagaaggagaaggagaggaagaggaagaggaagaggaagaggaagaagaagaagaagaagaagaagaagaagaagaagaagaagaagaagaagaagaagaagaagaagaagaagaagaagaagaagaagaagaagaagaagaagaaaaggaagaagaagaaactgtctctacaccttcattctcaggacaagttcattgtctggcaccaagctccttggggtgaattttcttccaaaagagtccggggagtccaggtatggaatgggaggcagaaagttcaatcaagggactgggatttcggaatgaataatgaagggagatggactgggtccatgccgaaggtttctccctggtttctcagcccccgggcgaagactcagggagacattgagacacaccctgcacaggagggggagggggagggggagggcaaagtcccagggccccaggagtggctctcaagggctcaggccccgaggcggtgtctggggttgggaggctcagtattgagaattccccatctccccagagtttctctttctctcccaacccgtgtcaggtccttcttcctggatactcataacgcggccccatttctcactcccattgggcgtcgcgtttctagagaagccaatcagtgtcgccgcagttcccaggttctaaagtcccacgcaccccgcgggactcatatttttcccagacgcggaggttggggtcatggcgccccgaagcctcctcctgctgctctcaggggccctggccctgaccgatacttgggcgggtgagtgcggggtccagagagaaacggcctctgtggggaggagtgaggggcccgcccggtgggggcgcaggactcagggagccgcctccggaggagggtctggcgggtctcagcccctcctcgcccccaggctcccactccttgaggtatttcagcaccgctgtgtcgcggcccggccgcggggagccccgctacatcgccgtggagtacgtagacgacacgcaattcctgcggttcgacagcgacgccgcgattccgaggatggagccgcgggagccgtgggtggagcaagaggggccgcagtattgggagtggaccacagggtacgccaaggccaacgcacagactgaccgagtggccctgaggaacctgctccgccgctacaaccagagcgaggctggtgagtgaacccggccgggggcgcaggtcacgaccaccccccatccgccacggaccgcccgggtccctcagagtctccggatccgaaatctaccccgaggcagcgggacccgcccagaccctccacccgggagagtcccaggcgcctttacccaggttcattttcagtttaggccaaaatccc

SEQ ID NO: 12856 - DNA, 2187 bp, Homo sapiens
tgttcctgccttaactgatgacattaccttgtgaaattccttctcctggctcatcctgactcaaaagctcccccactgagcaccttgtgacccccacccctgccagccagagaacaaccccctttgactgtaattttccactatctacccaaatcttataaaacggacccaccccatctcccttcgctgactcttttcggactcagcccgcctgcacccaggtagaataaacagccttgttgctcacacaaaccctgtttgatggtctcttcacacggacgcgcctgaaacagtttaacagggtttttcctgcccagtcacaacaaagtgatgttatgctgcaggctgaagtttacagctaatgctgttgaagtctaaaatcagttttggtttgttagatttgggtgagatggctaagattctcagagaaagaagtcaagtttggggtgcatttttcagacttaaaaatttagcagtagcccttgcagtttttccaatagaagtgatttaagaatgttttcaggaaatttaaaacaacagtgagaagcgtgtatggagagttgaactacactccagacttggctataggaaagcacgaatgctgctattgtattgcaccttggaaaagagaacaaaggaatattttcggacaattttaacatgtcacatatgaaaagctaaacggaatctgtcaacaccttgtacgttattacaggctgtgattttaaaaaaacaatccttactaatacatacatagttgctgctagcaatatagtgttgggagtaaaaacacgaaaatgagagttcaggacaatatcccaactctgagcagatttttttaagtagtaacatctaaaattaaaccatattatgtaatatttatttcttttccacagtctcttctcatgcctcgttcacattagctaattaaaagtcccctgagtatcatcataacccgatttacagatgaaggcacggttgcaatgagctatcaccctcttctgaatgagacagtacagtgtgaaggatagcaaaactccactcccatcctcttagggctctggctggaccagcaaattaaattaatgtaaaatggattaacaggagaaaggtatatgcatttatttaacacaggttttacgtgacacaggtgctctcataaggtaatgaaagcccaaaaaaagcagttagctacttatataatgaattggacaattagtaaaatgtaaaaatgcgctaaagcaaagggatttaggctagaatatataactgtgtagagaagcgcccagcaagggctagtgcaaggtttgtacagaattctcttggcctcagcctcctatccttgagaagaatgttgctttttttaaactacagtgagaacatctttcatatgagaatttcacctactgcttctaagaaacaggtcagctttcaagaaaacataaggccagagtgatcttttcacgcctgctcttttaagtacctttgaatagtcaatatgtcttcaagcacttgaaagacttaaaaagtttaccactccggcatattagtgaaagcccttaatataagcccttattaaaattctcagtcgagggtataaattcagattcaaatagtagtgtcgtaaacgggagggaaaaactaaagggattaaaaagtgaaactattgtgttctccctcgcagtccttaggtcactgcccctcgaggggcggagcaaaaagtgaggcagcaacgcctccttatcctcgctcccgctttcagttctcaataaggtccgatgttcgtgtataaatgctcgtggcttgctttcttttcgcgtacctggtttttgttgtcagctggttagacatgtctggtcgcggcaaaggcggtaaaggtttgggtaagggaggtgccaagcgtcaccgaaaagtgctgcgggataacatccaaggcatcaccaaaccggccattcggcgccttgctaggcgtggtggggttaagcgaatttccggtttgatttatgaggagactcgtggcgttctcaaggtgtttctggagaacgtgatccgggacgccgtgacctacacggagcacgccaagcgcaagactgtcactgccatggatgtggtttacgcgctcaagcgtcaaggacgcactctgtacggcttcggcggttaatcttttcgtcagttttcttccaatgg

SEQ ID NO: 12857 - DNA, 2176 bp, Homo sapiens
tcactttgtttagcgcagttttgaataaagaagagtctggttaatgtataacatctcaacacaaaggtcagaaagcaacggtcatgcaccagaatcaggggaagttgtgttacctcagtcagctttcaggccttaagttttcccttttgcatgataaatttggaaggtcctaaatttaaattttttacaatgctgatagaaatatagacagtacaggccatgccaaaaaatctcagatagaaatgagaaactcattggaagctggagcaaaattcacccatgttactctgtagcaaagaacttgggtgcactgtgtccatgccctaaggctttgtggaaggctgaactaagagtgatgacctacggtgtcagatgcaagagatatctaagcagcaaagtgctcaagaagtgatgtggttacttttaacagcttatgttaaattgtgacagcaaaggaatgacctaaagcctgtgtttataattaaaggggaagaagagcattaaaatttggataattatcagcctgcacatagtggtagagaagaaaagagaattttcaggagaggagtccaagaaagtgtcagaacaactctgctaaagcatgaccaaaagggggcctggtgctaataggataataggaagaaggttccaaaggcatttcagaaatctttggggctgctcctcccatcacaggcccagaagactaacaaagacagaatggtattaattctgcaggcacccagaatgtaggggccatagatgcttggtggtaagatcctctacaaagaattccctctagggaaatgcctcatgaagccatgggagtggggccacccccaagacacagaactgtaggatcaccaatttgcaactctagcctgagagagctgaagcatgggctgataccagctataagacaatgttggccatgcatggtggctcatgcctgtaatctttgggaggccatgatgggaggatcacttaagttcaggagttcaagaccagcctggagaacatagtgagaccacgtctctataaaacgttaaaaaattagctgggcataatggcatgtgcctgtaatcccagctgctcaggaggctgaggtgggatggttgcttgagcacgatagattgaggttgcaataagctgtgatcagactactgcactccagcctgggcaacaaagtgagacactatttcaaaataaaataaatatgaagagatataaagagtttttttccctgttgagttttgggcttacttggacagtgttgggttgggttggaacagggaagagaatgggtcagactctgagtgtagcctgcaggtggatctgatggctttttcacatccatgtgagaaagaaaagagtcagggcagtctctaagatttgatgttggaagaactagaggaataggggtgacatttgctgagatggataaaaccatacctggaatgagagtggccagggaaggatgtgatcaacctcttagctttggacaaagtatgtttgagatgcctgttagatatccaggtggagaagtcaggaagatgaggatgcaggagagaaaaccaggttggatacacacgtgtgggggccattggcaagccacatggtatccaagctatgacatttgatgagataatgtacagagtgaacgtggataaagatgaggaggaatcagcaaaagagaaggaaagcaagaggaaaaccaggcaaaagtggtatgctggaaccaagcaaaacaaagaattaaaggagtgttcatcaagcctatgtgagctccatttctctctcttgggttgaagcaataattttctgtcagtcctgggcataaacctgcttcatgccccttggattgaaagtgcaagtccagttgacctcaaatgctctaatgttgtaatgtccataaacttggctaggaggactgctgttaccctttgtaagactccaaagttatccactgtcaatgattagctgagctctctttccgacagtgcagggattctgaagctgtctgcttgagttactgtgctctcttccaaggctgtaggagttctggagctgctggctggagaggagggtggacgaagctctctccagaaagacatcctgagaggacttggcaggtgagcactgtttcaaggaatgggctgatggggtcataatccatgat

SEQ ID NO: 12858 - DNA, 2171 bp, Homo sapiens
agttatggagcccaggcttgttctcagccctggtcagcggtgccatcgcaggtcgctccagccccagccgcaggtgcccagtgaatgctctccgtgacccagggcctcctgctgcaggtggaagccgggccacgggaacctgcgccgaccttggcctcacactgtggctccgggagagcaggacctggtggtgcatgcgtagcggctgaggaggacaagcctgggggctggtcccagcccggacacggtggctttgcacacaccaagccttcgcccccagcggggccagcagtgcagggcgctgcactgttgggggccagagggtgacaggattggtgtttaagaagaacttctcagttttatcttttctctgttttgatttggtttccttcatctctactggcttgggcttttggtccttaaatcctctaatatacagaattgtttcctggacctcaagccccccatcaggggggaaacctcatcccaggatgatgggccggtcgtggggcaccctggctgggggctgggggctggggctgtgctctggctctcgttcctgcccgtggaacgttgaacgttgccaggacatccaccccggggaacttgacgtcctcaggcactgctgggtccaacgccagcgctgggcgcaccaccgctgacccccgacccctcctgcaagtccccctatctgctaagtaggaggatgctggggccaggcgaggccttgctgggcagcctctaggatggtcactacctcctcccacctggaggtcccttcaggaggtccgcggtgttgaagcctggggaggaagaggaggctgaggcctgggagaggaagaggagggtgaggcctgcggggggaggaagaggagggtgaggcctgggggaggagggtctcactgctctgggtcagaggagggctgagtacacgctgtgcggcctggttcttgccaggggtcagctgactacagccccgccttctgtgcagcccctcaactaagaaccgttgtacatttttgaagggttgaagaaaatcaaaagaagaatattttgggacacacgcgggttatctgaaattcagattcgtgtttccgtgcccgcagctccgtcagcggggcccatgctggccttgtgtgccctgcggctttctgggtgcagttgcagcgctacgtggttaggacgggggcagggtgactgcacagccccgtgactggctgctctccgcaggaggcggccccaccctctgcccacatcctccctggctcctcgaggctccgtaggatggtgaagaggttgagatgctgtccagcccacagaggccccggaaagccagtgccgcccgtcagaggggtctcctgagtgcgtgtgggtggctggattctgcatactgggttatcttaaccccggctgtgaaaactggatgaagtagcaatcctttcaaccccaagagtctgtgattcagccagagttacaagatgtctcttcatcctctgaggtttacaaggttctcagaaaacctgtgaagagctgcgcggatcctctcctgccccggcccagcggcagggctgccgcctccctctcccctgggcctgagtgggtggatttcccctcccctcctccttcccaggagaagcacagagggagcggccaagcgagccgtgtctgcaaaccccgcttccctctgcggcggcctctgccatcgtgccatggggccggaggtccctggtccaggtcagcatgtccatctccactggcctcttccatgaggggggtggcagggccagcagttagcttgtgtgacgtgacgtcagggggatgtcttagagtccggggtggcaccaggaggggtgaggtctcttcccttcttccccatcctctcctctctccctgttggaggcacattctgggctctgggaccacgattgcccatggctgatgagctccagcccaagtgaggtccccagggtacagcccaagccaggcctcgccgtccttcggggacttggagagcagtggcccacagcagcctgagctcttgggaggctggaggcttactgcgcccggtctcttcaccccgtggggtgtgtccacaccggcctctcctgagagcgtggggtgatctgaacacaggatgtgtttccctgttcccctctgggagataggagagt

SEQ ID NO: 12859 - DNA, 2162 bp, Homo sapiens
ggaaaggaaaacactctgaatggtaggaatttaattctgactgatttacttcatgtattttgttttcttttagtacgactttactccgtgacataaaagaaggactacagaaagctgtaatagaccatacaataaaagccattgtgatttgtggagcagagggcaaattttctgcaggtaactcaagtctaaccctctcccaccatctctggaatccagccacagactgagaccaatactgcattagctgtgcttgttggtaataacttagtgtaggtaatggatatggcagacttgagtgagaatgagtaacactgtggagaaagggacaggaattacaagagagacccagagaagggcttagtctcttttattgtggattgggcttttagagtatatttagttccagacttgatggctgttatacacctgctgatatatacctgcattgcatgtatctccaccatatgtgggcttgggcaaatctctttaacttcctgaacctcaatttctctatctataaagtgggaacaataatatctattttaaggggtttttgtgacattaagcgagataacatatctgaaagcctctactacagtacctacacaaagaagatggtcaataaatgttattgtttaattcacacagagtcttataatagaattcatttttcttccgatagtcacccatctcagtgaccatggcactgctttattgggttattgtgtgaagatgcaaaattattgacaaaatatggcaaaagtatgctgaaatggtgatttattcaatggcatatatggcgtcttttccttaatattcatacattataccctttgacaaaagtcacatggatatgggggcctattcaaccttactgtagccagagaaatttaatatgtgttaatggtagtctgaaaagacacagatgttagaatcatggcaataaataaatataaaaatgtgaatcattataatattaccatttatcttgcctgttatatgccagtaccatgtaggttatttattaaataataataataaaaataatagtatttttaaacatgttatatgttaattctcagttagtcctacaatcctcatttacaggtaagaagagattttgagcctgggagagattaatataatgtcccaaaccttaaccagttattaaatggcttactcactgtttggaaatttaaggtttgtcacccaagatgatgacgatgatgcatgggaagagtgctcagaatgataaagaacttgatatttctttgtaagaaagaaggtagatgagagaatgtaattagagtttggaggcagaaaaaattattcttctaaaaaagtattagggattatgaaacttgacttaatacatttacatagaacaatgcaccccaaaatgggagaatatacattcttctgaaatacatctggaacatttacaaaaattgaccagatactgaattataaaatcttatctaaataaatttcattaagaatacattatctgacaacaatgcaattaagctagaaatcaataacaaaaatataactagtaattctcatatgtttggaagttaatttccaatatcctctgagtaaaaacagaaataatggaatttagaaaaaatttggaactgaatggcaatgaaaacataatataaaacttgagggatgcagctaaagtaaaacttatcagaaaatttatagctttaaaaatatatattagaaaagaaaaatggctgaaatataatgagttaagtatttatgtaaaggaactgacaaactaaccgtaaaatacaccctaatcaagtagaagaaaggaaataataaagaggagaaattaatgaaatagaaaacatttgaatcaagaggaacaacaatgttagttttttgagactaatacaattgacaaactctggagagattgaaggagaagagaaggcaccaagcaatgcatataaagaatgatgaaagggatatcattgcagatactgtagcctttaagaaagataatggccctttggctgatgcaagagcctagtgcggtggtgggagaggtatcagcaggagcagcgctgccacggggcctgggggctgacctgtctgacttcccatccatgcggagcccactggaatcgcatccatatctggagatg

SEQ ID NO: 12860 - DNA, 2151 bp, Homo sapiens
taggctgagctcaactcttccatctaacacctttccccttatctttacctcatctctaacagggtgctgagatgtgacgcctgaaaggccaatattttggcttttcagttttgttttggtgaaaggaatgaggatgtggaatacacattgttgtaggaaccataggatcaacaaatttaagaatcccccatgtacatctagcccaacttattctgaaatgtctgaattctgatcccattgtgctgccaaacaaataatttgctgtcctgttggaatctgagagtcaaaagtatgtgaaagttcaaacgtggtcagggattttttttttttaatggatcgatgtggtaggtttggtggctttgtttttactgccttctagaaccaagaaaatccttttctatatcattcactcaactaatgcctttcactgtttttagaggcaagttggcctggttccttgcttatatgcctgtctccctcttttcctcttccaggaaattcagagatactgactcatcttcactcttatattaaagcaagccagtttatcgatagttattaaatctagtatgtccataagcaggcttcatctggaacattagaatgtgaggtctagacggtgtttaggaaaatttgctttcagatcatgtgtggtaaaactatacaaacagagatggacaagtgacgtggtgtagagcaaggtaagaaaggaaaaaaaaaaaaaaggaaaagaaatgatgttccagaacacagagatttgggaaagggatggaaagaaatgacagtgggtatagcggagtgcttttaaaattgatagagagcatggtgggttacaaaagcaatttagtgattttcaatcagcattaaaaaaaaatgatatgccatagaataaaaatacagaatgcatactgtggaaggacaaatattgttttggaaagtttttctatacatacataaatgtatattagatgtatataacatgtatttacatgtgtaacaattgtaactacaaatgtgctccccgcccacacacactggagcctgggtttgttttgtaaactgtttcacagtgtgggtcttggttccaagtttgaaagcccttagaacacaggatccagaaggatccgggcaaggtaaattcaaggtcaagggagagtcccttttctgtcccctgccatccaaagcagttaatggagggagaggaaatggcgtgtgggggaggggaccgcagagtgaggccaaacgaggagcaagggcgcgtcaggacggagtggtgccgggcgccttctgcctgaatggtcgatagaggaacttggggaggttgattttgggtgctttccttaaatgctaaaccgaaagaacttccgcgtttcttgtccctgaaaagcttgcaacggtgaaggattcgcgttgctccttgaggtgaccctatatggggtcaatcccagccaaaggaatgattacgattaccaggggccagatgcagggaggtgggcggggcgtgggaaacgcgggaaggccgggccgggtaggtccacacagcgactcacgtcgctgcacgactctgcacagcccactggagggaacaagcagttctacacactttgagacccctatggaggcgagccccaggacactagtggaagtgcgctcttttcgccggccaggagcgctgcctgccaaagggcagtactcgtctccgccccatgccatgcagctggatggctctgctgtccgctcgccgggcccccacgtgacctactgcgcgggccgccgcctccaccgcgcccaggccccgcccccgtgacgtctcatcgccctctgcctgtccgagcgttcggctcttttgcgtttgctgattggccagcccaggtgacagcgcccacccccaccccccctgacacgcccctggagccttgggggtacgcggtggggggcggggcctgggccggaggggcggggtgagaaggctgcgcgcgggtaaaggggccgcctcgagcgcggtccgagcgttcagcggacgcgcgcggcctcgatctctggactcgtcacctgcccctccccctcccgccgccgtcacccaggaaaccggccgcaatcgccggccgacctgaagctggtttcatggcagcctcaaagaaggcagttttg

SEQ ID NO: 12861 - DNA, 2139 bp, Homo sapiens
ggctggagtacagtggaacaatcatggctcactgcagccttcacctcccaggctcaaagtgatcctcccacatgagcctcccgagtagctgggaccacaggcacatgccactatgcccagcctaatttttgtatttcttgtaaagatggagtttcaccatgttgcccatgctggtctggaactcctgaactcaagtgatccgcccacctcggccttccatactgctgggattacaggcgtgagccactgtgcccggccctcacctgtttctttttactttctaatgccactactagaaaattctaaatgatatatatgtccttctgcagagatgaggcggaaggagaggggtctccattatttttcggtctatgatggtgaagcctgacattctgtcccagggcaaagaaggtgggagctgttcagccttatcagtgatgccaaaggtagggccagcacctgacttggaaaagcaagtgcaaggtttttctgatttatttaggctctaacttgattggcgtggctaacagaggttatggggaggagcctagagctccaaacccagtcaggagatccgatttgaatttcagatttaaaaatgaatgattttttagtactaacttcctccccgtggatgtctatatttatttgttaagtctgacaactctaccatggaggatcatatcagagaaaggagatgctaggttgaaaagtaaaaacatcctaggatttaagagcatgagccgggagctaaggcttcttggcttcacaggatccaccacttataactgtgtgatcttcggacagttactaaacctctcttggtttccatggtaaaacgggcatagtaacttactgtgtgagattgtcacaagatttaataagttactgctgtttacaagtgctttcccacagcggcgtctgtttccccttagctagcaactcggctgtgttttctgcagctgctggtgagttctctgcccgctctttgcccacccgcgtcaggccggtccccctccggcctcttctgtggcgcgagggacagcggaaaccacggtagacagcacccccttgagtccaattcctcccctttcggaggaagccggtttctcctttctatgctactcccgggccatttctggacaacagctgctattttcacttgagccgaagttaatttctcggggagttctcgggcgcgcacaggcagctcggtttgccctgcgattgagctgcgggtcgcggccggcgccggcctctccaatggcaaatgtgtgtggctggaggcgagcgcgaggctttcggcaaaggcagtcgagtgtttgcagaccggggcgagtcctgtgaaagcagataaaagaaaacatttattaacgtgtcattacgaggggagcgcccggccggggctgtcgcactccccgcggaacatttggctccctccagctccgagagaggagaagaagaaagcggaaaagaggcagattcacgtcgtttccagccaagtggacctgatcgatggccctcctgaatttatcacgatatttgatttattagcgatgccccctggtttgtgtgttacgcacacacacgtgcacacaaggctctggctcgcttccctccctcgtttccagctcctgggcgaatcccacatctgtttcaactctccgccgagggcgagcaggagcgagagtgtgtcgagtgagtgtgcgtctgtgtgtcccggcgagggtgcgcgctcggcgccgggagcgcggccagccgagtccggaggcatcgggaggtcgagagccgccgggaccccagctctgcgttcactgccccgtccggagctggacttcggggccggggccggggccgtgcgccggggacaggcagggccgggtcgcgggccgcgcgtcccccaggccggaggtaaaagcgctagcgcgcggagggctcgaggagggcaccgcggctgggccccccgcgccccgggccccagccgtccgcggctcccggcccgacgctccccgccccggagcgcgcccgcctcccctgcgtggaggccggcgggcaggcgagcggggggcggtagcgccgtgccaaggggctggctggggcagcgtggccggccgggctggggcgatttaagagcggtcc

SEQ ID NO: 12862 - DNA, 2138 bp, Homo sapiens
tcgcatcatgagacactttgaatccatagaaataaccctgccccacactttgttctgagaaatgttctgtacatctagtagctgtgtttactaaccctaaattctaggctcccctctgcaaacagataggaatctctggagtcagctccccgtttcccccaactctactctctcataaatgtggttggaggccatgggtcctcttcctctatcaggggccatgtagaggcacaatccagattttacaggaagttgtgtcagaagaggatccttgtttgggaataaacctcagtggaggagacgaggctctgtatcagcccaattgttcgaggttcaactcatttcaaaagcagatatagtacttacaaaggggacttgagtgctactcatgacttgaaggagttttgaatagggtacaggagtcaaccagttgaaatagaaagcagaaaataaacaacctaaacggccgaatataggtacaaatgatatagttctggagtaatacattctggctagggaaacttaggagttatttacagaagaatgtaagcatctgagttgagacctggatgatcagataatttcaacagtcagaagaattttaactagtaagtggggtggttgggtaaaggacactgtgagggaaagaatggaataagcatagttactgaagcacccaagcaaaagcaagtgtggctatttggactgggctaggggttactacggggccaaaacagaagagtgatgaggagttagaggccacatttcacctcaaagttaaatgatttgaaatttattctgctagcagtcgtctactgtttgattttcagcagcaaatgatctaagcaagacatttatttttaaaatgttaaaatatatcttattaaatattaccaaaatagtatgggaaatgaagagactgaatgtgttactaatccccaactgagaatggaattgttcatttgtgaagcttgatatttccctgtatttttattactactaagctattattttttacatttgaggtcagagcttgggttggtttatgccaaagtgtcatctcagctatctgtgagaagctccatgtgtggagtgcaacaggagtcccagcctgctctaggatttccacgacctggcactgcactcacatgtcgtagtagccggggcacactgccttctcctgtctgcatgtaggtctttaccgaataccaggtcccatttttaaataagaggctccttctacttgtttgtcccatgcttcccctatttatactgcctgagaaattgttttccatcagtaaagctgattagtcttttctgttttcccttgatctttgttagcatctgggctacagaagttgtcctcctatattaatctgggtatttcggttttgcttttccaaaggacagcaagctcagccaggctgcctctcagttccaagggagtgctcattccctccttccccagcccttgctctttccaaaaggatgatttctgtcgtcccagggcttatcccctcccactccagctcctcccatcatttgagtcaatcccacagcccccactatggctctattatatagttgtcgtcttcccataaccaaaaggttttaacgccagcctggcagcgtctttagactctcgcactcccaaactgtcccctcctccagctcgactcctccgggagcgcgcggccaccgctgcaagcccagaacacaaacgcctagagcttcctccgcttagaaacccggggcgcttggccccgcctcacctgctttcggccccgccccgcccgccgccggcctgctcacggctcctcccgtcctccccgaagccccgcctctgaccccgccctgtcctgtctccgtcccgccccacgcccgccagccagcgtcgctgtctctcgccttccctgaggccccgccttcagccccgccttcaaccccgccccgtcctgcctccgccccgcccccgcttgccggcccgcgtcgccgtctcaccctccccgggctgcgcggccggagctggcacagaggatcctcggccgcggcgacatcaccgcctgggcacgcgggcgctgctctggatacggcgccaccgagagaacccgccgcccgcgggtctctgtcctgcggtc

SEQ ID NO: 12863 - DNA, 2137 bp, Homo sapiens
catcctgggttcaagtgattctcctgcctcagcctcccgagtagctgggattacaggcatgcaccaccacgcccagccaattttgtgtttttagtagagacagggtttctccatgttggtcaggctggtgatccgcccacctcagcctcccaaagtgctgggattacaggcgtgagccaccatgcccagccaaaaaatttttttttcaataagaaaacttttaggttagcaagcatttagtaagtgtccacttggtacccacaatgacaccctaattcagaaatagttagggaacattactttgtgttaggccctgggctaggggccaagagatgcaatccctacccttgaggaattatgcagggtagagatggggggcagataaagtagcagttattatacagagtgataagggcattgctgaaaacctgtcatgccaatcactgaatggctttgcctcagaaaacaagcagtctactcttttgaggaaactcagagccccagaggtggcatcagatgagataatggcctattaagtgtgcatgtattttacatgtatctgtaccttcacttggggtgtcctccaagccagactcttaagagctaacacttaactacactgttccatgaaataggtattgtcactatgcccactttgcagattacaagacagatatacagaaccaggaacttgcctactatcacacaacttttaacagagtggggctagccagtctgactccagagtcttcactcttaaccctgagcagacagggaccactatgtgaaaggaaacatttaaagtaatgtataaatatggccactttagcatgcagttggcattgtaagtgtaagattttaagcagcggggagaaaatttcattcctagcttaaaagctcaaatgttacacgagacactgagctttggttctcagaagtttatcttagtgtaaacttctactgccactaggacacaaaaggaacatctctgcagtcaacaaataagcattttgagtatctactgagcactttttgaactattagcatctgtttcccactttggtctagtgaagattcccatgattaatattttctgcttagttcccagtcgctttctgcccagctgatcttccccgccccatatagcagcactctcacttcactgtcttatctactttagagcctcaccttggagcccttgcttcaagaagtggccttcaagcttcagctacccaaggtccccttgccctgtttatcctttctttttctggcccgagtggaccctggggcagggtgaccttattaaagactctataaaacaaagttgtctgtcatctcttcagagacaccaaccctgccccccttctactggtatttgaaaaaagaactctccctgctatccacttccctccaccatccctgggaaaaggacatgttggagtagtaacacgtggtcattgccggggtgagcagccagttactgtagtgattggatagtgacaattcccatcccacctccctacctgcagcatctgactggttggtctggtttcagtgttccatgcctagattactggatagaggatggtaggcacataaaacattgctcatgccccaccctctatccagctttcattaccatccttctttaatcacttttcaactttggctttatcgttcttatttaatcctttttcactcccacctctactgtttgcctgccttctattctctctattttctagaatcttccaatcaagcagctgtaactttacatgtcctccacccagccccctcccctgccccctgggaagaccaggagggagcactccagccctggggggttaagcctctgtagctgctgtaacttgagaaaagaaggccaggcctctggagccagcagtcggctccctgtggcctgccaaaggataagaaccttgctcactcagctccctccctcttttctttcccctcccctgctgcagcaaggccctcccccatccgcacacacaggctgctgggtaagtggcaagatggctcccctgcatgtctccggctgatcgctgccgctccgccaatacaatagagccagccactaccagcagcctggccctcttcctccttctccagagagacc

SEQ ID NO: 12864 - DNA, 2135 bp, Homo sapiens
gccttgaatttgtgcacttctctgttccttatctgagcggtgcctttctgtagtttgtcttggagtacgtgtgtgtgcgtgcgcccctgtaagcgctgcctggggaggacagatgggagattaggggagacactccccctgtcctcgagggggacagtggctgggaaagatagggtttaggttggaatttcagtaagaaggtactaattacaacgtgcttggttggaagttggtgccaggccagggcttggagagaccatgggaaaatcacctgtctccctgccttctccctgagttagtttgccacagaagatccaacagccagactggtttgcaccgacggttcccaaatgcatggactggcactctgggctgttacacccgccacagctgctcggagaacttgtctccttgcttcgggggagggtcgacattttaattaaactaaaaaagaatgtttttctgaatcttagggcatacagccacttttaccatttttatttgaatttgagttcaggtaaacttaggcaaatagaaaagtgggagagggtgggaagagacaaggtgagcctgcttttcccaatactgggaaaatgaattaaactagacgggggacgtcagagaacagaatgccttgcctttggtctgctttttaatatattttatgatcccaaattttacagaaagtctcaagggtttctgtgttttttaaatggtcaaatatgtgacatacatgtgtacatagatcacagagccccactgtagttttttaaatgagccacatttaccttggggaagagcccctccccccccgccatcataatattgtgaatgtaaagagagattggttcacaatgagaatgtacagtaggctcctataagggtgacaggattatatgcagaatgactttgaagagccaaaattgatttatttatgttaagtagtgctaagaaggaatatttgtcccggagtgaggcatttgagatagagggggaaaagcaaaaaaaaaaaaaaaaaaaaaaaaaaagtgattacatcatcttcccgttcaagcagtattagtagcgaagatgggttcatcagtgaaatattttgcaaagataaatatacctccactctgcattctgatctatagcctctttctttttggaagaagcattttctttgcccagtttttttaggcagtcacattaaaattctcattaataatgttgacagacaattacgtttattatttctgctaataggcatctgcattcctattcagaattttcattgttagtctataaagtctagttttaactttggaatgtttggtagaggaggacatctatacattttcttttaactgtcctttctaatgtggtacatttgtgacagtgtttgaattctgggttttcagtgaattatggaggactaaaataccaggagtagtccgtactgcttctcttatacatgagagatatctaaggactataaaacataacttaagtatacccttttaatgcctttgtaagatttttaaaccaaggaatgactgggctatctataaacccagatgcactaagtggggagaaaagctcggagctgcagcatatcagcttttgtcaacctgccaacagcagagcgtaccatgctgcaaggagtaataaacaaggaattagaaaactcgctgctggagaacagtcaaattaaacacctttttgaaaggatgagcatgtatatattgcagttctattaaatgtagcttcttagtgaggttggcattatgttaaggctggtatggaagagaactgatgaagcaggagtggtctggtgacatttttctgacttgattggctggggcgtgtgatgtaataggtttcagtgcagccccttataggttttaaaatgaattccaagacaccattacaaagaaagccggactcttttcttataactgagctcagccaaggaaactcttgcacaaatgtacaatactgtttggaatatggaagacctggatttagaatatgccaagacagatataaattgtggcacagacttgatgttttatatagaaatggacccaccaggtaatactgcagtattattgtagagagttagttaatttcgtggctttttaatttttcga

SEQ ID NO: 12865 - DNA, 2133 bp, Homo sapiens
atcaatttagcatgtgccacagagaattcaagttgtcatatgtgtgttgcaatttttatttctcaggagagggtgaatttcagctattttttgagtttattttgaaggaattttagggattatatatataagattgtcttaaggtaattgaaggccctgccatgacattagtttttctcacactcatggagtgaaatgtgtggataccgtacattaaaagtaatggcaaaaaccgcaattacttttgcaccaacctagtacaaaggtgcatttaaaaattgctgaagccaaaggaccagacaagagttcatcaggttttaggaatccattaatgttttcttcaccaaattccaggactaagaaaaggaaaagaattggggcaatcccttgtagttttgtatgtaaagatttgacctgtattccagggatcttgatttttatttctaataaaagaaaaatgttttcttcgtgaacccacagaatcatattgattctgtagcattgttctcctttttcagatgaagaatattagtgtcagaagtcaaaattgagctgcttttgtcctcaggttgggctttctcatttgaatatgcctaggaattcagtgcaagagttctgagggtttatggctgctcgttatcattttttttgcttgtattaaagcaaggatatatccctaatctgtgtcccacctccccttgtcatctatacattaagtcctacatttggctgttgtgggtaaccatccctcacttgctgtgggtagaattttgcaagattgcagagtaagacctgtcagctgacactggctcacatgagagccattaagagggtggtgtggccaatgtcagaacaaccttgcagctgaaggcaagtcactgcattgcccagagccatatgaacaggtcttgtgaccaattaattgactactacataatctccagctagggtgcacagatggagtgagtcagtccaagctgctcaacctgttaaatgtcttttctttgctaactggagtataagcttaagaacaaaagtaggacttgtctatgtttgtaatgggattgcagacagcgtgttttgtaatgtgatagatggatctgacttcctaaattattggcaggcttaatttacgtaacaaatgaatgttccacctttttttttttttaaacctttgaaaggggaaattagtacactgctgtcaagtagcttttctcacatactgtatagggagtgaaatgattgtttagaactgctggtcattacagaatgttcctcacataacaaaggaacttcaggatttgtctccaagtccatgtttatggtcaggataaaccagaagaacattaaaccgttcaggagatgtgcggcggcacagcgaacaccacaaaccagccagagagctggcaagactctgccagatgtgtgagtgatgctgttcctggtgctgggaggatttacagggcgcttttatgcacaaagattaaaaaacacaccggagtagacaggagcactgaccacacggaactcgacaacaggtttgaaactttagttgtttcaaagtctcagataattttttatttaatttactgtgtagtaaggagatggaattgtattgatctgaaagttgttgtttctcataagtgcttctaagtaggagaaatggggttattggtggatgtgcagagtcaagtcccttctcttacagaagagatgtaagcatgggtattttttagtgactattgtgacttcactacccatctgttttcttcttttcattacctctactggagccaacttataagaagtgtgtacatctttgtcccatgaagcttggatgaaactgttcacagtaattatcaggaaaaaaaggtgccgtcctgaagtagcagcacagttagtagatggggctcaggcctgggcgttttcacttcatagtctgcgtggcagccaggtggttgtgcttttccagttggaagcagggtggtcggggtgacccagtcttcctctggaagaccctttccatgagaaggatgttatgaacagcaaattttaataatggagcttgtctaaaaagaatagcatacttataatattctttttggtttatttcatccacgttcttccgttaat

SEQ ID NO: 12866 - DNA, 2132 bp, Homo sapiens
gctgaacaatgagaagacatggacatagggaggggagcaagacacactggggcccgttggggtgaggagggtgggggtatggggagggagcgcatcaggaaaaatagctaatgcatgatgggcttaatacttagatgataggttgataggtgcagcaaaccaccatggcacacattgacctacgtaataaacctgcacatcctacacatgtaccccagggcttaaaataaacagaaacagaaacaaaaaaaaaggaagtaaaaaataagcctaaaaggaaaaagtaaaattttttctatttgccgatgacgtgatcctacatagagaaaactcaaaacacgtcataaaaattgttaaatccagtaaagtagcaggatacagaatcaacatacaaaaatcagttgcatttctttacaccagtaatgatctatctgaaaaagaaatcaggaaaacacaatccatcataatagcatcaaaaagaataaaatagagggtggaacaaggtggccaaatagaaccttccagtactcattcccctgcagggacatcaagttcaacaaatatcctcacgagcccaggcggcacagtgtgaagacagagtctacctccttaggaagtaaaaggaatgttagtgtgggattttgcattggaggctagtgctgaccccactgcagtggaacacagcactgggcagagcctccaaggcccttgattctaggctggaggccacagagggagcatttagacccccgccccgggtcagagggaaatctgctacctcagcaggaggaatccaagttccagtccacttcacaaccacctaactaaagtggccttccgccagaccctaaaacaaagatttgcattcaggtagattatttggaagatgatttaaggacgtaccagtgcaggagttgtcgcgggacagtgagaccagggcagtttgacaatcaataaagggtgcatcattggcaagctacctgtgaacaaagggagcataattccactggacaacaccaggaggcagtgttatacaagcctaagggtaattccacctgaccaggtacagcacaaagatatgtggcctccaactcccaacatcctgggctgaatagtggtcccagacccatagttttcaagtctatctagcctgcctgaggacatgccaagagaaagccttcgcatagagtcccgagttcacgtggcaggacgccagaggcatgttctagaacagtaggtgccgaaggcacagcacaaggaaacactcactggtggaatgttctcaaaacaaagaaatgataaatgtttgaagtgatagatgtgctaattatcatgatttgatcattacacaatgtatgtatgtataagaacaccacattgtaccctgtaaacatgtatattgggtcaataaagaaacaaaaattatgttgtatagagaaaaatgcataagaaacagcaagagttgtagatcaataccatgaatgtaaataaaaaacaccagcataaacaaagccatatgacatatatcaccctcataccacacacatggggctctttcagacacattgcccagtgccttcaggtagagaggccagtgggaatgaggatgatggatgaagggaagaaaaatttttaaaagaagtctaatgggaactgatgaagaaagtataccataaacttggagtgtgattaaagccttccatcttcctcttttgcctcctctaggttaccagttctgcttttcctggacctgttccaagctctcacgttccacatcacacatgggacatctagtgtcaggctcccagagagcaggaaccaggtgaaatataagagcacagtcctcccagccggtggcatggggataatcggacaatacaactctccacccttttttatggtaagatatgaataaggggtccacaggagcaacctgagtccctgcaactacatttcccaggggcccctggggtaaccctaatgtgactctgggggcggggccagttggacatccaatgagagcacttcccctgcagactttggaagtgagagcacttcctcatagaccttggatgtgggaggattgcattcagtctagttcctggttgccggctgaaataacctggtaagtg

SEQ ID NO: 12867 - DNA, 2130 bp, Homo sapiens
aggttctctgtgttcttgccaacactgtaacatacttaagagggcccagggccctctgacctcccagtcatccttttttaaaatttggactcagaaaaagagacacgggttatgatgtttcttaattcttttataatgatgaaaaggcaaagtcttgttgccaatttaggtacaaagatgcttcagcactcctgggaattagtcaattttgtatttcttcagtatttttgaaagaacttattgcaattattgatgatggcaactttaaatggtgcaatatcatgtttccaaacaatgagagaccttggatctgtcaccccaaaacccagctggtgattctagcaccaaatctcagaccccagtctcatggcaggcaagcatgatccctgattagcctccaccctgtgccttggcaggatcatgcccagaaatggaggggctccccagcctccttaatggcctctccaccttgggctgagcctgcttctccatggctaggtgcccactgcatgctcactcttggcagagctggctccctggggcattgcctatctgctccaggaaatgctttttagtaccaagtagtctaagcagagtcaagaccagcttttcagaataagcagatttcagagtcacatattggtcagactcacctgccaagaaaggtgttcaggtgacctattatttccctcactgttagtaccttttttcttcacttagttaccctttttttttttggtgggggttacagagtcttactctattgcccaggctgcagtgcagtgacatgatcatggctcactgccaccttcatctcccaggctcaaatggtcctcccactttagcctcccaagtagctgggaccataggcatacaccaccatgctgggctaatttttgtattttttgtagagatgggggtttccctatgttgcccaggctagtcttgaactcctgggctcaagcgatcctcccatcttggcctcccaaagtgctgggattacaggcatgagccactgtgccctgcctagttactcttgggctaagttcacatccatacacacaggatattctttctgaggcccccaatgtgtcccacaggcaccatgctgtatgtgacactcccctagagatggatgtttagtttgcttccaactgattaatggcatgcagtggtgcctggaaacatttgtacctggggtgctgtgtgtcatgggaatgtatttacgagatgtattcttagaagcagtattctagcttttgaattttaaaatctgacatttatggcgattgttaaaatgaggttaccatttcctactgaatactatcaacaccaaaaaagaagaaggaggagatggagaaaaaaaagacaaaaaaaaaaaaaagtggtagggcatcttagccatagggcatctttctcattggcaaataagaacatggaaccagccttgggtggtggccattcccctctgaggtccctgtctgttttctgggagctgtattgtgggtctcagcagggcagggagataccccatgggcagcttgcctgagactctgggcagcctctcttttctctgtcagctgtccctaggctgctgctgggggtggtcgggtcatcttttcaactctcagctcactgctgagccaaggtgaaagcaaatccacctgccctaactggctcctaggcaccttcaaggtcatctgctgaagaagatagcagtctcacaggtcaaggcgatcttcaagtaaagaccctctgctctgtgtcctgccctctagaaggcactgagaccagagctgggacagggctcagggggctgcgactcctaggggcttgcagactagtgggagagaaagaacatcgcagcagccaggcagaaccaggacaggtgaggtgcaggctggctttcctctcgcagcgcggtgtggagtcctgtcctgcctcagggcttttcggagcctggatcctcaaggaacaagtagacctggccgcggggagtggggagggaaggggtgtctattgggcaacagggcggggcaaagccctgaataaaggggcgcagggcaggcgcaagtggcagagccttcgtttgccaagtcgcctccagaccgcagacatgaaacttgtctt

SEQ ID NO: 12868 - DNA, 2128 bp, Homo sapiens
ggacactcattcttccaatttgcagtgaggacagggtcccagggatggcttgcaacctggaggtttgggacattctcaacttcagtgtccttaaaggctgcttttaataaagtacaaaagggagtttgtgggccttgctctaatttttggagtttttgtctgatgtctggggaagcctgacttataaaatgtatggccagaagggattggccctcagggctttcaggatctaaatctgtatatttatgcatggcctccattagtctagcttggaaaagggaagggtccttggtcctgagtgatctctcataatttagaaaaattaacaggttttatttcattccttccaacaaacatgttataatcttctcttcccctgtctctgtttgggctggcattggcagcgtggtattgccaattgggttctgtgttggggacagcttctgccctggctctattattaggattgccaacatgagtttcgtctgcccaaactcgagctaaagaccgtgattttttcttcgtgggaacagcaaatagttaataccacaaatgtgtcttgccaggttaaatcaaaggcaataaagcccgaaattcttgaatgaacttagagggatcctggctaaatgaacccaacttggattgaatttgccaaagttcagacaatggaaaagggacatgaactcaaattgttcccaaatctccgtttgccaccttgtggagaggcataacacttgggggattttctgaggactttgtactagtggcatatgtaactcctgtgcaagtatgtgagggtaataaagtatctggatggtaggggacaggggttgattggggcatggagcagatggcaaggggtgcacaatgagttttgacatgcgtgcattacggagatgcatagaaattctagttacttttaaatttggagggaagaagtctggtaccagatgctggctttaggtaacagggaagtctagttacctctaaattcctcaggtaaggagtttctgcctaaggatggtcggcttcatggccaccaggtgatctttgctttcaattctattggcttgatttcatctgtggcagtttctggggggaatcaaaattataggaacaaaataaaactaacagtaaaactttcatgctgactggggaatgcttaacgtttaaaaataggtgctgaagggtccaaagcaaacaacacaagccggaaaagaaatgtttaaaagttagctatatttatacaaggaaaaccaaaagaaatacttaaatgagacttttaaaattcgaggctctccactgagacttgttccctggcgccagctccgggagttccgcagagcctcgccccctgccagggcgcccggggcgaaggaccgcacggcgcatgcgcgcctcctccagcagtccctttccccttcttccccaagatccagcgcgtgctcggttgcccttctccgttccttgcaggcccttgggtcaggacccaccacctgccggaccatcattttccgagtccctccggcctagtcggagtgctcgctcgcgcctcctaaagctctcagccgagcgcgccgagacccctcagggcggccggtaagaaggcggaggggcgggggctcaaagcgcgcggcgaaggtgcagcagttaccagggtgctgacgtcagctagaggcagggcaccgcggaaggttgaatccacgccctggctgtgcgcaggcgccgtagggggaaggcctggcacgctccagccaaccagggcgtcacctgcagctcgtccccctgcccgggcttgcctcgagcgccctgccgccgccggagcggggagggtgttgggggcaggtggagccgggagggcccagctgagaattcagggttgggggctcagagggcactgcggctaggagcccgtcaaagcctgtcgcccaccggggcgagggcaggtgggagcgcctggccgtgcgtcgcgcgctggttggccagctgacgccccagtgcgcatgcgcgtccgaacagccctgcgggcggagcgactgtcctcccttctggtgtactgggtgggaggtggaactagtcggacaaagccctcgcgtcggacccttgccagaactgtaaggagcaagag

SEQ ID NO: 12869 - DNA, 2126 bp, Homo sapiens
acagtgggaatgttaggggagttgaccttgaatagacagatgcatgctcagtagaaatgtctatgacaaagaacacaaactggccaggcccagagacttgtgaagagcgagagaggctttggggagagaaggaagagggtggagtcaggaagaccagtgttcaggcaaggttctccaaatagggagattttcctggcttatctaggagggccgaatgcaatcactaggatccttttttttttttttttttttttttttttgagacggagtcttgctctgtcgcccaggctggagtgcagtggcgggatctcggctcactgcaagctccgcctcccgggttcacgccattctcctgcctcagcctcccaagtagctgggactacaggcgcccgccactacgcccggctaattttttgtatttttagtagcgacggggtttcaccgttttagctgggatggtctcgatctcctgacctcgtgatccgcccgcctcggcctcccaaagtgctgggattacaggcgtgagccaccgcgcccggccactaggatccttaaaactggaagagggagacagaagagagtcagagaaagggatatgatgacagaagcagggccatctggctttgaagatagaacaaggaggccatgagccaaggaatgtggatggcttctagaagctgaaagagccaaggaaattgattcccttctatttggcagaaagaaacccagcccagccaccaccttgattttagccgatggagactcatgtcacacttctgagctacagaactgtaaaatgataagttggtgttgttttaagccactaaatttgtagtaatttattatggcaacagaagaaaatgaatgcacggcctcatcctgatattcccgttcttaaatccatttcattttatttccacctggacttcagccctaaccttgcctcatctctgctctctgggtccatcttctggcccctggattgttgagaactccaaggggatgtgctattcagttgaatttcggcagcaggcaaagggaggagtccaagaagagggcaggtgaaggcaagggttaagcaagagttctagctctggaagcagactggcttggtactgaacctccgggagcttttgttctctgtggaagcctgagcaaggtatttggcttgtttctttggctccaatgtaaagacagtgataggtgctacctcagaaggttgctgtgaggatgcaatgcgataatgtgtgtaaggtgctaaacgcagcgcccagcagacaggaacacaggaaatgaatggcagagaaactctattagacatttatcatgtgacattataattaatgttcatgtgccatcaggagaccagatccaaggaacggcagaaagatcacaggagggcactcaagggcaacgccgagcacccagggccaggtgcccagccctcctcctcttccccttcctgtcccctcccctttcctgctggggcagcaggggcttagggacaaagccccaggcgatgaggaggtggcttggacagctggtgctcacacacacacacacccccgccctgtctcccagaggcctggcagccccacactctccccctccgcctcctccccacaccccctccacctcgggctgccctttggtggcagatcagggctggtttcccgaggagtggggcgcacgtggcgcgaagcccccgccttctcgctgcccctgagcagggggccgtggggggagctggccggcggccggcatggggttctcacttcccctccccaacggccgcgggtgcaggtgccgcgggccgagtcccgcaggcggggcggactctgtggacacgccctcgtggcgaggccgggctgccctgagggaggaagcgccagagcggcggccggtcccgcgcggagcccggcgcccctccagcccgagccaggacgccgccggccccggtcccggccccgggcacgcagcgagccagggatgtgagcggcgccccgcggcatggcagcctcaggtgggtaggcaggcgccgcgggtccccgggctcccggcccctctctcgtaccccgcatcccttgaggcgcgctcccccgcttgcttctgtttgcgtcctctgt

SEQ ID NO: 12870 - DNA, 2121 bp, Homo sapiens
cggagatgtcagtcaagtgcttaaccaatggtggggagtccgggagggggattcttggggttcaggaaagaatcctgagagtgggaagatttgtccttcaaaccttttacagccaatgggagcgtggagggggggcgagcgggagagggccatggggggggaggggaatggccagcctcatgcctccgtacccattggagggcaaaggggttagggggcggtgtggccccccctattccattcgtcccctgggggtacagcagccgggagccaggtgagaagggatccatcggcggccgagggaggggtgacctggcggtgggctgaggagtggtggctgtggcccctacccgtggatgtgaatgctttaggagttggccacccatgttgtgaactgaggttgttcccaggcgccaacttcctttctccccagagcctctggagggagcattgctgtgcgccctttgtgtccgcggtaggggagctccagtcgtcacaccgcaggctggaggttacgcttcgagtcgcttaccgaatttgtgtgcattcacgtggacacggcctgtggggccttttgcccctgtagggtctttactgagcacgtgtctactccaggctggggtgcttacaagctgaaagcttgaggtctgcttaggaacagaaaccaggcccaaggtgggtgctggcagtagggggtctagacagcatggtctgagatgcgagggaggctcgggacctggaatgatttcacagctcccaaggtttcgggtttctccagggtggcctcttccatcgcctccctcatcccctcccccagtcctgaacagttctctccttgtgtactgcgggggagggaacggaaaggaggaaagagttactttcccaaattactgagtagcagtagcctccctggtgactcatgtgggggaagggaggatagaggatcgggaggcagtgattttccggaatgcagggaataaacgagagcaatgtctggctgcccttttcctaaggcctagtattttctcagcctcctaagtttttattccatggccggccccctgatgggcctctgtcctggcctgcagagccccggtggagaaaagcagatttgggaggttgggccgctagggggaggggaaaaggcctctgcaaagttgctgtgtcattgccctccatgctgcagccacccaaacggggccgcttgtacttttgggggccagggcctgatccctggctgggggaaggggactctgctctcctgacgctcattttcccccgccctcccggggtttgccctactcggggggtcagaagacaggagattggcggccattttagacgcagtaaccgaggttggagttgaagggctactgcagaggagggagggtggcgtggttgcagctcaaggacctaggcccttacgagcccttccggggcgagggggaatcttaccgtatatttgttcacctacgttgattatttttcccagatacgtacacaagtttgttttctccctggtagcgaagaaaggggaaacgggggaggggacgccccaccaaagcccaggttttctcgggtgggggagatcctttcactctcttgtaagggggcggggacggccccagagatgctctggagatcctgactctgggctctggttgattcacagagtctgcacccttatttagataaccaagttaggaggaagacttaagagtaagttggggggagggggcgaaactgagctcccaaaatggctcctgcccctcctcggaggcggacggccggggggaggggaggaggggaggagggggagggctagtctgagccgcagccgccgcctcctccgctcgccctcctccctggcgctgaccgatggaccagccgctccgtggggaggactccggaccctggtgggggggcgggggggttctttcgcccccgtggcggagggcccctgagaggcggatacgggtgtgcctttgggggtgatgtggcgtgtggggggaaaggtccgagctcgcctggagggggagggtttttcccttaagtcatccctcccaggacttgctttttctgctctgagccggacgccggaatggagtttgaggaagaggt

SEQ ID NO: 12871 - DNA, 2115 bp, Homo sapiens
cctcaaatgatcctaccaccttggcctcccaaagtgttgggattacagatgtgagccaccatgacttctttttctgattttcttgggctaacagcacctgccatgtttccctccccattgcccacccccaagttttttcaagagaaaccagaaaaagagagcacttgaaatctctctatttttaaggtttggcacttgatacaaaattacacacacatacatacacacacacacacacacacacgagtgtaggctaaataaaacagctcaggggctgtagttggcagcaagagataagtgatggaagcccaaggacaccctgggaagttagcagagcctggagccagaacttagggatccctgcaactcatcgtatttaggtcatgccaccatgcctgcagcactctccagctcttggcaagaccatgggtttcttctagctgattactctccctgggggattctgcctccagagctaattctgccttcagggctaccactagtggggcccagggccttccttgcagcttcattctgtggattttggggaagggcagggggagagtgggtgggggttgaattttggcaaggcactgagggtgcttctgagagtcatccagggcagtgggtttggaagtgggaagaggaccatgagttcctctgctctcttaatgtgaaagggtaaaccaacctggatggtgtcaagtcaagaagggaccctccaggtccatccctccagggatgaagggaggggtgtgtgtgtgtgtgtgtgtgtgtgtgtgtgtgtgtgtgtgtaggcaggcagggagctgtggacccagggccaacacaaaagactgcactctgcctccactagattaaaatggaaagccaaagttgtctcaaggtgtggaaaataaatcttggtgttttgttttctttcacaatcaaacctaatgggaagcctcctaacctgtggccccaaaagcggggcattttagcccaaggcaatttctcctcaacagactaccatgggttgtggggagcagacacagggaggaaactctctgaggactgtagcccccaggagctctccctcctagcttcggctgacagtgggggagggggagtggaggccaactccggcttccctatttccggacccagcgaagccccactctttcccgcctctttagcctttctgaactcgtcgggtatgtccccataagaagcacttagaccttttattcccgcggaagtggagcgcctgcagccagaggagcaggggacagcagggggcaggatgggggtgaatgagggctgccccccaccctcagcaggccaggcgccgctggtaaggagccgtcgcccagagcctgcccctaccctgtcctcggctgcccagggctcgctcagttctgcctgcccggctggctgcatgacaatgacggctgcagaagccgagcgctgcggccgccgaagggacctggcgcgaaacgggccattaagcccagaatggcggcagggtgggggtggaggtgggggtgggagtgggacggggctatttatagaacaaagatccgcggccgccggctgccccagcacagggatgcagccctggccttgccccacgggcgtcctgcgctggggagaaggccaaactcccaggccgcccggcggcagggctgggctttcggtggaaaatggctgggtctaggaatggagcgcctgttcctccctaaacgccgagtcccagggtctagaggacagagccccagaaatgcagggagggcgcggcgcggccaagcagggaagggagtagttccccaaagcggccactctgctctgactgcaaactgccaccgccctcgccccgggacccagggaggctgggaagatcaggtgcagagagcacccaggcggcgggcggctctcggcgctccggggctagggcgggcgggcgtgtcccgtgcctgctctgccgctatctcccgcgcgcaggagctgacggatggctctttaataagccgcccgttaatcttcccccgcctctccaacctctgcccggggacatccgtattttctggcccgataaggctagagaattttagtcggtgaaatgtagccaggaaagtg

SEQ ID NO: 12872 - DNA, 2104 bp, Homo sapiens
agctacgcgcaggagataatatgacagatttattatatgctgacattttatcacctttgcttcagcgctccctctcttcctccacccccctttctttctaagaaataaaacacttaaaaaccccttccccccaccaaatctcatgcccccatcctgagaggtaagttagcttgcatcccttaccttgtatattttgtcctttattattaatgtttatttttaggtatgcgtttttgttctgaatttaaaatttttgcacgagattcagtattacagggttttaacttgcggtgctgttagtcctgacattgcagacccggaagggacttagtgagtgccagtcactagcccgcttcatttagctgaaaaatctgaacactggagaagataaaagatgtgctcactgtctctcaggtgggccttgacttggcagaatcttgaattcaggttctcttgatttctctccctgccatttcctttacataaaacctgccgcggagctcacctatctacatggccttctgacttgttcctaatgatccaatttggagaaagggagttgaagggagatggggaaagggagtatggcttgggttgggactcaaaccccagttaggattaaaaggtatgcattttcctgaaatatgaaatattgaattttaggatgatttgaatatttatttatgaggcactcatccagtcttaccgtataccagacattgattcaagaactttacaagcataaactcacctaacttaagccttataataaggcttagtataggtattacttttctcatccccgttgtataggtaataacactgaggcacagaggaattaggtaacttccccaaagtcacaccgttggtaaagtgtagctctgggatttgaatccagtccacttagtctgggtccctgtcaccaccctgcatttcccatgctggagccagcacctgtgagaaaggtgaagtggccacatacacaagagagaggagcagctctcagctgatatcataaaggaaagaaatggggagcgggcacgatggtggctcacgcctgtaatcccaacactttgggaggccgaggcgggcggatcacttgaggtcagtgatttgagatcagcctggccaacatggtgaaatcccgtctctacaaaaataaaaaaattagccaggcgtgatggcgggcgcctgtaatcccagctatttgggaggctgaggcaggagaatctcttgaactcgggaggcggaggttgcagtgagccgagatcgcgccattgcactgcagcctgggcgacagagcgagactccgtctcaaaaaaaaaaaaaaaaaaaaaaagaaaaaggaaagaaagaaatgcgatttgaactgtacaccgaaaaatacattttggttaactattgtttgaactgtatattatttttaatttacaaaagtaagacacgtaactgcaaacagtgcagagttatataaaaagttgcacctctcctatttctcaagttaaacaatattaatgggtagaaatgtagccttcccttctccccaccataatacaaatatatacggggtttgtttttcctataaaaacaaaagcatattcaacaatttctacaatttgtattttccccttggcaatatatcacggtatattcaccgactaaatggagattcaagctcttcctaagaactgaataatactaagcagaatgtttgtcccacaatttgctcagcctttcccttactaatgtagagtcagagaagtttgtatctttaatgaaacagccgtccacactgccaggatggggtctccaggcgtccctaagccacagcaatgccaagccaccagggccggcgacacaaagaagcgctgtcccccgccaagcgccgccccctggagctcccactccagcctgggaggaagtggggaggaggggactcccgtggaaacccctcctctcctccagctccagcctcctccccgctcccaaatcccggctcggtcgcccagtcactggtacagggaagcctcttccctgtgcattcctctctgcgccaggctctgcccgctcccacctgcccccgtggaaatcgcagggtgacctg

SEQ ID NO: 12873 - DNA, 2098 bp, Homo sapiens
ttagatgcagcagaaaggaaagggggagagggtttgcagaacagagactattttatttagtcctaccaatctggcctgagacaggctttcatatctgcttttatagagaagaaaagaggggccaagaaggctgacttcctcagccagtttccagttgctaggaatgagctatccctgggtcactatgactgcaaaaccagaggtttatctgctaccgtatctcatagcacagaagccactaagatgagtaaccaccaaaggaattaagacaagcacacatcacaactaggctacacaatgctactggcacgatgaaagaggcagaaaaaagtgcctgggggtcacaacagggcaaaagcacatcgagtggaggcttggtggatcagggaaggtttctgagatgtggtgacattccagaaagtccttcaaagatgcactgtgttacaacaaacagagaaggaggtgttagaagaaaggcctcaatacgggggcacggaggaatgagaggtaagcagtttagatgcggaatgaatctagcaaagctacatcaagaagttagccacgtgaaaaaaaaaaaaaagaatctcctcccacggcaaggtccatcacgtgaggccaggagacttcaagcctacaaggaaaggcgccacacatcaggcccaggacactcacctgtgtgtccaccccaggagaggcagaaggacccgctggaccccaggacgccaggacgcccagacacccacacattcttcctcgtacaccttgttccctcctttcccttctcttcccttcagaagccttccacctgcctgtgccttccatagccacaaccaggcacactctgggtggctgagggcaactcacttcatcttccttttcctctcagagagggaaggaagagctttgtttccttttcaaggatccccaccagcagcaaggcaggtggaagaaactgagggaagaggaagcaggacccccgccgcccccccagtctagcctttacagactccttttaaggagctgaagaggttgggagaggcttgccctgccccggggcagcagaaacccgggcgctgctgcagcagctgtgggcgatctccgtcagctcctgggctccaggatcctgcggcctcagcccctccgcgtctactctcggggccaccacctccagttggcttctccagggcacttcatttcattccgtccctagcatccaataagacgcgaaaaacttaatcccattttacaactgaagccactgaggcccagagagcaaagccatttgtcctgggaaagtggtcaagctgggactttgactcttcagaccacccaagggaaggggtgtgtgtgtgtgtgtgtgtgtgtgtgcgtgtgcggtggggggcgcttgttttgagttcttaagaaaacctcctggcgacccccttcttccacatcccaagacgctcgtcccgcactttctcgggaatgaggtttctgcaggcgagggcggcgctgccttcttcctccgcggcagtgagaccccgagggcgccccagggtaggaggggaggccgaatcatctcctgagaagagcgccagagaacttcagagcgtttcgcccttccccgggagaggcaaacaccgacacgtctgtgtcttttaccaacaagtgccttcaagcccggcgggggcagacacctccgcgccggccgccggcgaggtctccgcggtctgcgggggccacggcctcgcctcagctgcgctgatttagggcgttatccggtcccggggcgggaggcggcctcccgggcggcgaagcagcgcccgcggcgtggggcgaccgcgcggtgggcggaggggcagggggaggggcggagaggcgtccccggggcgcagggggcgggcgtgcgggcacacgcggtgcgcggcgggggcggccatcgtgctgcgcagcctgggcgcttggggagccgcccacttcgccgggtcgcgccccgacggccggagcgtggatgcggcggcgcccgccgagccggggcggacgcggggcggcccgggcccgggagacgcgccggcagccccggcaccgcagcggtcgcaggatggccgaggtaagc

SEQ ID NO: 12874 - DNA, 2098 bp, Homo sapiens
aacctcagaggcctactcaactgaggccaagcccacccagctgttcccacaacaggagccggactgccaggacccacctggtcatgacatacggggcaaagcagatgaggaaggtcgcaatagcaatgccaatcttcctggtggcgcggtggcggcgccgcttctgctggatgaggcagcgctgccgcacactgtggggacagaggacagtggtcaggatgatggcagggtggggacagaacccaggcccagagcccaggggctgaagtgagggcagacaggagggtttcaggaggatgtttagcctggaacctgaggaggacagagggatgggggagagagaaagaacaaggggtaggcttgcttttttgtaggtgaaataaaggaagtctggaaagaagggccagctcctcctcccttccctctggctcatccttctccacacagaggcaactgaggcaggctgctgatggaggggcaaggctggggccctcaaggagggagaagtcacgtggcctgcccaccccaggagcaggagagcctcttgggtgttctgtggggggccaagggggaaaggggaacacctacaggaggtaatttggaacaatggcgacaccagctagagattcaggagacaaatcctgccaagtagtgagcagaaagcatgggggatggaccctgctcaagacttgaagcccaagtccatgcaagggcactgggtcagcagtgggcagaaacaagcagatgcctcagacccacagccatgcacaggaggggtgtgtctggccgcccacagcagagcccgcggaacccctcccggagaagcacaccccacagctctgcgcaaagctccctgtgcactgagcacatatcccaggaggcagaggcccccgcagtgtctgcaccaatgaaccaacaggaaacccctgtgagcagcgtgcaggggcagtgctgtggctggtgaactctgggcggagtaacggtggtgatgcccacaggctcctcaagccaactgcccagggagcgcccaagtccctggcctgggcctgtcggcatgcactgggccaatacctggggtgcaggtcggcgagcagcgcgagcgccttcatggtgacggtgtccatgcgctggcagtgtctgcgtgccacccggtgcacctggagcgaggtgaggcagagcaccgccagcggcagcacgaagcccacggcatggagcgtggcggtgaaggctgcgaagcgcggacgctcaggctcgggcggcaggcgcagcgaacaggacgcgaaggcgctgctgtagccaagccacgagcagccaagtgcagcgcctgagaaggccagcgactgtccccaggcacagcccagcagcaggccggcatagcgcggtcgcaggcgtccggcgtagcgcagtgggaagcccactgccagccactggtctgcgctcagcgccgccacgctcagcgccgcgttggacgccaggaaggtgtccaggaagccaatgacttggcatgcgccgggcgccgacggtgtccgcccgcgcatcacaccgagcagcgtgaagggcatgtccagcgccgccagcagcaggtggcccagagacagattcaccaggaggacgcctgaggctcgagtgcggagctcagcgctgtaggcgcaacaaagcagcaccagtgcgttggatagcagcgccacggccagtaccatcaccaggagacccgccagcagcgcctcgccggggcccatggcgctagcggctcgccaggcaccctggggttctcatggctctgcttcgggcgcgagcctgggaaagtgaggcgatggagcagctgagcggcgcgcccacggcttctgggaggtgcagagccggctagcaaggtccagagcagcgcgaggaaagcggcggcaagtgcagggtccggggcacccggggggagggcgtagctctgcggagcaggagcagcccggggccgccctggaggcagcgcaaccgcggtgctgtccagggtgctgaatgcgctcaccgtcccggcaggactgtcctgaggctgaagcgaggcgcaggggcgcggggcgtaggggcgagggaggtctctttcctaaca

SEQ ID NO: 12875 - DNA, 2097 bp, Homo sapiens
tttagagacagaggtcccttccctcctgttggggacctcttgacctgctccctcccctccagcttcacccctgtccaaggaggctgctcctgatcccaggattctactggatggggggttggggaagggtgtcacctcctttcctttataggcatgaccaggcatggcccccaccacttatgcccacatcccacagggcaggatgtagtcacatggacacgccatgcagtcagggggcctgggaaacattctctctctttaggtgagagctctggggaagaagggctgaatggacattggtggacactggctgtcctggcacagctgcccaggtgctctgcagagtagatatttgtgaaacattaagaaggccctggtggccaggtgcggtggctacacctgtaatcccagcaccatggaaggttgaggcgggtggatcacctgaggccacgaggtggagaccagcctggccaacatggtgaaaacccatctctactaaaaatacagaaaattagtcgggagtggtggtgcatgcctgtaacctcagctacttgggaggctgaggcaggagaatcgcttgaacccgggaggcagaggttgcagtgagccaagatcacgctattgcactccagtctgggcaacaagagccaaactccgtctctctctctctctcacacacacacacaaaaggccctggagacaaaggaacactccttgtccttttctcctggcacagcacaagattctgttgctacatctttatttactgagcatctagtatgtgctgcacctggcactgttttgtcttttttgttttgagacaaggtcttgctctgtaggcctggctggagtgccatggtaccatcacagctcactgcagcctggaactcctgggctcaaacaatccccccacctcagcctccctactagctgtggttacacttgcgcaccaccacgcccggctaattttttaaatttttctgtagagacggggtcttactacattgcccaggctggttttgaactcctggcctcaagtgatgctacggacttggcctcccaaagtgctgggattccaggcacaagccactgtgcctggtagtggacattgttagcagtgactaaagcagagaacgagaagggggaggccgctgtaaacacatgaagacaggcagcgtaagagaaagtcacgagggcaggaataacatccaggcatacttcagatcccagctcaagaaaccactcccaggccaggcgcggtggctcacgcctgtcatctcagcactttgggaggccaaggcgggcggatcacaaggtcaggagtttgagaccagcctggccaacatggcgaaaccccgtctgtactaaaaatacaaaagattagccgggcgtggtggcgggcgcctgtaatcccagctactcgggaggctgaggcaggagaatcgcttgaacctgggaggcagacgttgcagtgaactgagatcgcaccattgcactccagcctgggtgacagagcaagactcccgtctcaaaaaacgaaagaaaagaaagaaaccactcccagactccctgcctgggcgggatcctttgatcaagccctcaacatgccttggggctctcttcacaatggtaagtttgcatttgtttgtgtgattctaggcctcctcttattttcttgaacaggcctcatctggctttgttcatctttatgtctccagcatccagcacaatccctgccattagggtcatggcttcataaaaacgtcacgaatgcaacgcagaagtgcatgcatgcatgaataaatgaatgatgcatgaaaagagcaatctccctgtcctggaagcagcttcccctaggggtgggggtggggtgcggaggcaggggcagccagtgatgtcacaagaggtggctgggatggaacgttctggaaggttgaatggggtagaaggcctgttgtggagggaaaccacccatcctcctgcctcccaccaccaccatcatcctggctggacggagagggtgacgggggctgggaaggggcagctcatgttcaggtttccaggaggggctacctgttgactgtctttgcaggaaga

SEQ ID NO: 12876 - DNA, 2094 bp, Homo sapiens
ggaggttgcagtgagcctagatagtgccattgcactccagtctgagtgacagctaaactccgtccaaaaaaaaagatagcaaatgtagccaaattaatatcaagaaccattagaaggctgggcatggtggctcacacctgtaatcccagcactttgagaagctgaggcgggtggattgcctggccaacgtggcgaaatcctgtctctacttaaaatacaaaaaattagctgggtgtgatggcacacgcccgtaattctagctacttgggaggctgaggcaggagaattgcttgaacctgggaggtggaggctgcagcgagcggagatcattgcactccagcctgggcgatggcacaaacaaagaaacaaacaaacccattagaaatgtaaagaaattgaccacagaagttcaggagactcctgttactccacgtttttatattcactgtgtcctgtaaccgcctgcgaagttgcatggctgtgtttcagtcaggttttgtatttgtcatgactacgtagttctcagtaccttttctagtaatttttagcctgttctcatttttttttgtatgaaatatactgggaattcacattatggatgcaggaagctgtagtatgaatataaatatctaggatttgacgtgaatgcgtacgtgctttgccctctcatttttttgtgttctgggttaataaccccactgcacagatgtgatactgtctacaacattccttcctttttgtttcgcctgtttcttctgctgtactaagctacatgagagtagcattttggcttggtcactgctgtatccttagtgtctaggacaaggctggacacaagtaaggtgttctaagaatatttaatgaaaatatgatgctggtagttctctgcttcaaatccttttggaagtaaaatgattgttttaggatattttaggctgtaagttgcaggaaaccaaattcaaccatcttaagtgataaacccatcatgctgcttagtagaaagtcttgggtaagggtgggtttgggggttggtgaagtaagtggctcagcagtgtgagctctgctgtctctgcgtcagctgcccccagccggttcctcatggtcagaaggtggctgccagcacagtgagcagcagtgtgcttccctgttaacatcatcttagagacagggagactggcttttgtttgctggggattgtatgtttgagaacctaaatgtggtagagaaagattggggaaaaatgaaaaacatttcgtttcttggtaaggacagatagcatgaattgaaaaaaactgcaaagagagcaagaagcttcagcgtgcatgattttggagatgccggagtatggggtgactgaggcttgtggcactctttttaaaggtttggagaaagatgagaagtcaaccatgcttagatatggggaaggagctacattagagactcatttgttcttctgaggtgcccacttgcgcttgtgctaaccttaccaaccttagtgccttaaagaaatagctaaaaaagctaaagcaaggccaggcgcggtggctcatgcctgtaatcccagcactttgggagaccgaggtgggcatatcacgaggtcaggagatcgagaccatcctggctaacatggtgaaaccccgtctttactgaaaatacaagaaaaaattagccgggcgtggtggcgggcacctgtagtcccagctacttgggaggctgacgcaggagaatggcgtgaacccaggaggcggagcttgcagtgagccgagattgcgccactgcactccagcctgggtgacagagcaagattccgtctcaaaaaaaaaaaaaaaaaaaaaaaaaaaaaaagctaaagcagaaaacaaaagtggcccatggtctcagcttccagataataactattgatttcaaaaaataaaatggcctgggtgcggtggctcatgcctgtaatcccagcactttgggaggccgaggcaggtgggtcacctgaggtcaggagttcgagaccagcctgaccaatatggtgaaaccccgtctttgctaaaaatacaaaaatcagccgggcatggtggcatgctcctgtagtcccagctactc

SEQ ID NO: 12877 - DNA, 2091 bp, Homo sapiens
gccacagttaggagctttctcagtttacaattttactactcactgacctctgcctctcagtgccctgtactgggtgtctttaatattctattcaaatgaacttaggccaacgagctccccactgggggcactgggtgttagtcttgctcttcccttagccagctgcatgctctttagtaagtccttttatttatttgggctcagtttcctcattttttccacctggagtttgacagttggtgggaatggacagcactagataagtttcaaattaagtagactagtcgggtgccgtggcacacgcttgtagttccagatactcaggaggccgagtcaggaggatcgcttgagctcaggagttccaggctgtagtgagctgtgatgggaaccattgcactccagcctgggctacaggccctatctctaaaaaagtatcataaataaataaaggagaaaatgcaggtcaagcgctagcactgtgcagggcatgtgttatgctagtagatgtcactgattctccagctctaggtacactcctgtcttctctggcagacagcagcattccccagcaggggctggtggctagcccacgcagaggctcctccaatggcaggctcctcccctctgcaagccctacagctcaagggaaagaaactttcccatcacagagaactcaataaaccagttttccaaaatctctcttccctgtgtttacccgtttgttatgaatttacttcttgggtgtcagaatatttaagaactcggtggagaccagttttatacgtttccttctgtccttcctggctccacagctgcaaaaacatcatccccactactgagcttactatggggccacgcaagggtagacgcttgacagacattgtccaatgtattccttactgcagctgcccacccccgccgtccccgccccccagggagacattacttccgtcttccccaaaaggaaaacgaggcaccgagaagttaaggaacttgctcaaggtcacagagtttgaactcaggctacagatgctgcagcaactggagaaagtcctcatcgccccatatcacccaccaccgacccccagcaggacgtgacccccgccaggacggaggccggcagctggggggctggagcatgggacccagaacacggactcaggcttgcgcagcctcctggcttctaggcgggagcctagaaaggcgccagcccctttcgcgtgctgctgagactccaggggtggggttcactctcaggggcgcacaaaggcatgaaaaccttggcttcagcctctgagatgcggaactgaccgacctattgtcttgggacccaccagtgcgcttgggtgcaccagcccccttaacgttggtgccggctccctcccggctcctccccatcccagagggtcccctcgccccaggccctgagcctgcgtcctggggtcctgggccgcacgtgcctctggcagctcgaagaagctgtcggggcttgcaggagagcgtgcaaactgaaaccaaaacaggccgactcgaggaacatccgggtgggaccgcagactcaccggagcgcagcgcctgggccagggcctgggaccctgctccgccccgcgctcccctgcaccccttccccacgctgctcccctcttcctaagcggccccccctctcccgggcagcagaagaaggggtgggacccgggcgggctccgggagggggccctggaggaatggatggtggcggaagggcggagcaggggcggggcccgcggagactccacggggcgccccgggcgtgaggcacccactctgggagcacagagagctcaggtagcctgcctagatggcggcgcgcaccctgggccgcggcgtcgggaggctgctgggcagcctgcgagggctctcggggcagcccgcgcggccgccgtgcggggtgagcgcgccgcgcagggcggcctcgggaccctcgggcagcgctcccgcagttgcagcagcagcagcacagccaggctcgtatcccgcgctgagtgcacaggcagcccgggagccggccgccttctgggggcctctggcgcgggacactctcgtgtgggacac

SEQ ID NO: 12878 - DNA, 2054 bp, Homo sapiens
tgttgacctgagctattgcatgtagccaagtggcctgcagcaatctgctggtgggcaggtcttgctggatgcagtgttggcccactctccatgcccaacctgacatcaggtctcaggcttctgccagctctccaagaggaccttactgtggtaaatccaagttatcacagtctttactcgtctgttgagtctgtgggcctgaaccccctcagggtactggagaacctcccttttttttttttgagacagaattttgctctgtcacccaggctagagtgtggtggcgtgatctcagctcactgaacctctgcctcccaggttcaagtgatcctcctgcctcaacctcctgagtagctgggattacaggcacctgccatcacgtccagctaatttttgtatttttagtagggacagggtttcaccattttggccaggctggtctcgaacctctgacctcaagtgatccaccttctttggcctcccaaagtgctggattacaggcatgagccactgcgcctagctaggaggacctccccttctgaaccagttatggtatcccagggccaggaagaagctgaaagccttctgtgggaacaaaacaaagcaaaacaaaaacgcttcatggggcttccaccaaagttagtgttttaaggcacgcctcaggaacagcaacttggaagcaggttgttccaggaagtggttgtaggcagatttttcctgagttcttcccctgctctgagggctcattaaatcttcctctgagaagctccacttttatcttcattttacagatgggacaaccaaagctaaagagaggctaaggctcaaaagtcagagttagctagttggggcatttgggtgtgggcccaggccacgtaacttcatctgttgttctaagcctgaagccaagcccagagttaggtgttctgtatggggagcaaggtgtgaccatcttcctgggaccattagtctgcttgggaggccggtcatgacagtccagggcaaaagatgctgtcacaggatctcaagacaagatgctctagggaagagaaaagggagtgcccgctgtgtgtcaggacttgtgctaggctctaaacctcaggcaggaaagcatgggcaatgagccagaggctgctgtggcagcacagactgcggtacctcgaggctagtaagggacaaagcgtgggaagctgggatagaggctcctcacactctgaaaccagcaggaggaggtgcgagacccagcacctccatttctagaggtggcgtgaccttggctcggcctcccctctctgagcctcagtttcctctccagagtgaactgggggctgcaccccccttctcccagagtgggggacaaaaaaacgaatagcacaccgctgagattccctgtgtgtgcgcaagtgtatgacaagacgccgccggtaccgcacgagggccagggacgcagagaggccaagggcgctccggcctcgtagtagccagcgaaaactccgccgccagccactccgggaacgaagcgcatgcgccaacccatgccgtcacagtcacgtgccccacgctttcggcagaggccctgagaggcagactctgactgacacgtgagctgacctgtcagcaggaagcacttcccctggcgacgagcaaaaagactgttgattggggatagcaccccctcgggggcgggttctttgcagtcctggttactatgacgcccggcccccgccccctcggctagccgccatcttgttgttgatccgtacccagtgggcagcgccgggagctggaccaagcggccggtgagaggccgctgtagcggtgctcagccacctgtgctgcctgccagggggcgggccgaaacctggaggcccggggggcccagctcccgtagggagccgtgggcgctcggtgcccgggccgggcaggtgagtgacaggagccgggccgatagaccggcctgacgcccgcggggagggcggtggcgggcgcggggttggagtgggcgcgtgtggggtcggggctccggtggggccatcactggaacatcgctcgag

SEQ ID NO: 12879 - DNA, 2047 bp, Homo sapiens
gattcctttgctcacatgtttcctgctgaccttctccccaccatcaccctgttgccctgccacactcccctcgccaagatagtaaaaatagtgatcaataaatactgagggaactcagagaccagcgctggtgcgggtccttgcacattgagcgccagtctcctgggcccactgttctttctatatactttgtctctgtgtcttatttcttttctcagtctctcggctccacctgatgagaaatacccacaggtgtggagggtcagacccccttcaaaaagctcatatacctctctaaacagttctacaggaataaatggaggtggctgccaatatcccttaagccacctcaaaaaccaagttgacaaggtgtatgcttttttcttttctctcgggaaaaataccagtgccctctggtgtccaaagtgcaccttgagtagtaccacgtagatcagtttatcttcaaagaataatgtactaattcaatgttagagataattttttaaaataaattttggaggctgggcacggtggctcacgcctgtaattccagcactttgggaggccgaggcaggcggatcacttgaggtcaggagttcgagaccaacctggccaacatggtgcaacaccgtctctactaaatacaaaaattagcttagcatggtggcacacctgtagtcccagttacttgggaagctgaaagaggagaatcacttgaacccaggaggcggaagttgcagtgagccgagactgcaccagcctgtcagggcaagactctgtctcataaataaataaataaataaataaatattggagcattaaattctgggcagcaatatacaagcatgctattgtcctacaaatcacaatataaaatactctttattttcatgtttttgagagcaatgaacacacaaaatataatctctggaggagactaaaattcttttttcaatccaccgttttctaaggcttcacatctctagtccaacttcattggatcacagataatcccccgccaactgagcatggtggctcacgcttgtaatcccaggactttgggaggccgaggagggccaatcacttgagtccaggagttcgagaccagcctgggctgctgaaacccatctctaccaaaggaaaaagaaaagaaaagaaagaaagaaaaattagttgagtgtgattgtgtgcacctgtaatcccagctactcggaaggctgaggtgggaggatctcttgagcccaggaagtcaaggctgcagtgagcggtgatcgctccactgcactccagccagggcaacagagcaaggccctgtcttaaaaaagaaaataataagaatcccattcattatcttctaatgcaaacaatcaatggagtttctaaagacctagacataggtggtgtcaggacctgcttctgtaacttttccatcctttgcattaggcagcgcggaaccccctaggcgaccccgcgctggccgggagcactctttcttcagccaaaggtacgttccattaccgcccctcgggggcgcgctaggcagcgggccggccaagctgccgccgcccagggcgccctgtcccgttcgcttttgtgccgacctggaaacactctgtggtgctctagattgttacaaagttcggggtggtgcagccccagcgcgccccgctccccggcctgcaggtggcatacaagtctcttcgctgtcgggattcgggactgaatctctgccgggcggcaaccccttcccccaccgggatcaccgggaaagtggcaccatggattctccatctttgactgtggccacgcccctctcgctgactccgcccatcccacgggaattggcgtgtggcgattggaggcgtgtcgggggcggggctgggggaggtgggctgaggaggcggggcctgggaggggacaaagccgggaagaggaaaagctcggacctaccctgtggtcccgggtttctgcagagtctacttcagaagcggaggcactgggagtccggtttgggattgccaggctgtggttgtgagtctgagcttgt

SEQ ID NO: 12880 - DNA, 2035 bp, Homo sapiens
ctggctgtgtatgcgttaaattgaggaggagggcccatccagacaggtgctgctgaacctcaggacagcagctggtccatccaggagacctcccaggcctcagttcccatctagggagggccctaggtctggagggacaccaaaggcatgagtgtggtgtgtggtgcggtgtcatgttagctatataatagtaataatgattattattactgtcccctgccccaccctcatcagccacagtctgccaaacttggcctcagttataaagctaaaggaatcagccagagagagggggagtcaatcacaacaaagtcaccagtctgagcccccatcccacttctacccctgcggcctagactggccatttcagcaaactgcctagtgattctgcaagggaattttcacagccttggcgggtcggactcagatgggcattcttatctggatgctttggacttggctaagtggcccagagataaacccttaagaactagtgcctgtgcttacgccacctccaattctagctactatgtgttcttttggttctaaaggggcagttggctcaggtgaaaaccaggaatgtcccttggaaggcaggagcaaacagcctcaggacgaactttgaaactatgtaggtcctctgagggcagccccaggggccccatggtagcaaaaggtaggcctagccaaaggctgggcaaagcaggagcagggagagctccatccccctggccatcgctccaggtatcctgggaggcctctgcccagcacactaagtgtctgcatctggcaaaagagggcttgctcctgccccatggagctctctcctatttctgcttctcaaaaaaaaacaggtgaccagatgccttcttaatgtcaatattgctcatgttctctcctacaaaagaggccacatagaaagaaagtctacccagctgtacccataagcaggagtgggaccaaatggctacttgttctcaggaaattcagagccttaaagagttagttaggagaggccagaatgccgctgtgtcgtttgtttgctttgtttttaaggatctacaggaggtagttttccataaactaggaagctaagttaactatgcaaacacaagcagggtgggcaatgtgaactggccgttttaatgtatttgtacccgcacgtccttgcacaaaagatccaaggctgcgcggagtaattgctattagaatagtgggcatggtccctaccgccgcaggttcggaccttcaaagtgacaatttatggatgctccctggcgctccagcgcaggggaagcccactctgaagacgccctccccaccccctcctctccttccttccgactcaggagagctcgacacgccggatagctgcggccagccgtggccatcctggccccccgcctccgccttccccactcccgcgtgcagccgggacacgggaaaggaaagctttggaagtcaagcgccggccaaaagatgacctgcccgcgtgtctcctcgccccctcccccagccgtgtcacatggcggccccaaccaggcgggcagtgcgccccgccgcggagacccagggccgcgtcgcctgggcagtgggtgatgaaacttcccaggcgcattaccgcagagggcgcgggcggggcgcggggcgggggtgggggatcgagagctggtaccggggctcacctgttctccaggaggagggtggggacggggggaggggcgagtgcgcgccaacgccgggtgcgtgccctggggcgcttgggcgcggcgctcgtgtccccgccctcccccagccctgcgagccccccgagctgcgccgtggggtgacgggaccgagagcagttcctgtccccggccccggcgcgggggagacgtgagcgtgcacacgtacacacacagcaggggaagaggcgctccaagcggcgcccaactttctccttccctccacgggccgggtgagaaagtagccgggggctatcccgacccggcggttcttggggagggggccgaacaagaaaagggaggagatggag

SEQ ID NO: 12881 - DNA, 2035 bp, Homo sapiens
agggcaaaaagcagaacaaagatcatatgcttctgagggaacaggacaaagggcaaaagcagaactactaataagggtccaacaaagatcacaagacaaagggcaaaagcagagctactgataagggtctatgttcagcagtgcatgtattatcttgataaacatcttaaacaacagaaacagggttcgagagcagacaactggtctgaccacaaatttaccagggccgggtttttccccaccgtagtaagcctgagggtactgcaggagaccagggcatatctcagtccttatctcaaccacataagacagagcagccgtttatagacctccccccaggaatgcattcctttaccagggtattaatattaatattccttgctaggaaaagaatttagtgatatcttccctacttgcacgtccgtttataggctctctgcaagaagaaaaatatggctgtttttgcccaaccccgcaggcagtcagcccatatggttgacttcccttgttccctaaaaattgctgttattctgttctttttcaaggtgcactgatttcatattgttcaaacacacatgttttacaatcaatttgtacagttaacacaattatcacagtggtcctgaggtgacgtacaccttcagcttacgaagataacaggattaagagattaaagtaaagacaggcataagaaattataaaagtattatttgggaactgataaatgtccgtgaaatcttcacaatttatgttcctctgctgcggctctagcaggtccctctgtttggggtccatgacttcccgcaacatccaatcaatcctccataatgggcaaagtgatctttccatagtgtaaatgtgttcccaccactctctggagtaatcctacttaaaaccgttttcagcacaaaattcaaacatctaaacatgatcttgctggctttgcttttgtggctttaccctctttctccccaaacctagctagtgtttgtgctgcctgtaatgcccttctttctttgcaggggtcgccactttaggtcctggtcctccttcagaaagtttttcctctttctccccagcggggatagggtctgtttattttgacaccattagctcacttacacacattggtcacaagtctaggctgcaccgttattgaaagtttaccatctgactctgagtagcttgaggatcctatcaaaactcaggagatgctcagtaaatgttgattgaactatgactgttctcaacatacaaacgcaagatcatttaggaacacttgtcaaaatgtttttgccccttgagattctattttgggaggtaagcagtgggggtccaggactctgcattttgacagtcccctgatgtttgcatgtagaagtgcagggattattacactgacaaatctttaccatccctaagggggactttccttcccaggggctatctctggaagcccctcaaggataggggccgcatgctgtttctctaggtcagcaactaaacccagaaaacgtttattgagtgaatgatgaaacgacaggtgaatagatgaacgcaaggtgtcgagttaactattcttctacacaagtcctagcagctcccattgcttccagccgcagaaatggcccctggaaggcaagtcttccagcgagtggagtcactcttaactacatttcccaggattccaagggagccgcgcgctctgcgctcatcttcctaccagaaatcggcaagtcactgaccctcgtcccgcccccgccattccccgcctcctcctgtcccgcagtcggcgtccagcggctctgcttgttcgtgtgtgtgtcgttgcaggccttattcatgggctcaccgctgaggttcgacgggcgggtggtactggtcaccggcgcgggggcaggtgagcatgcgaaggttggaggccgcgccccttgctgaggcgcagctggctgctcttttcgggccggcatacgcgcgcagccgcagctgaggtcaccccgctgaggtggtggggaggggaatggttattcttgag

SEQ ID NO: 12882 - DNA, 2035 bp, Homo sapiens
ttcctgacagggtataggggaatgggtagggaagaggcagaggagatcggtgcaagtttgaatgaacacttagccctgtggaatgaatgtggtccagccctttagcctcactcagtacttcctttgtcccaactctatccctaccccaggctcagaatgttggggtatctccacctgcctgagaacttcaaacatacaggggctgggcttagagggcagcagcaccttcgttcagtgcatgagtgaatgaatgaatgagggagagaaagaggaaggtcttccatgtctgaaacttttttttttttttttgacacacagtctcactctgtcacccaggctggagtgctgtggtgcaatctcagctcactgcaacctccgtctcctgagttcaagcgattctcctgacacagtctcccgagtagctgtaagcacgtgccaccacacccggctaattttttatttttagtagagacgaggtttcaccatgttggccaggctgatctcgaacccctgacctcaggtgatccgcccccccccccctcccaccacccggcctcccaaagtgctgggattacaggcgtgagccaccgcgcctggccacagacttttattttatttcttttttagagacaggatctcactctgttgcccaggctggagtgcagtggcaccattgtggctcactgcagcctctacctcctgggctcaagtgagcctcccacctcaggctcccaagtagctgcgaccacagtcatgggcgaccgccctggttcctcccttccttgtgtctcctctttctgttctctaagttcctgctttattataggcaaagctcaggacattaaagaccctggcggtagagggtaggctatgggggtgaggccctgatccaagtcctgccgctaaggcactcataatttcgggctcaggggagaaatggaagtcaaagaatctcataaacacagctgcgatgacgaaccctttcacgggaaggaacatgcgagcccagaaaagtctctcctggtcttgggatggaggtcacacgaagcctccgcaaggcaaggacttttggtgagttccgggctccgctgaactcagctctttttcttttccttcctttctttccttcttcctttctttccctccttccttccttcctctttctctctttcctttctctctctcttttctctctctctctccttcttccctccctccctacctctctctcttttctttttccgtccttccttccttctttccttctttctctctcttttctttcttttcttttcttttctcttctttcattttgagacgtactctggctctgtcgcccaggctggagcgcaatggcgccatctcggcgcactgcaacctccacctcccgggttcaagcgattctactgcctcagcctcccgagtagctgggactacaggcgcgcactaccaagcccggctaatttttttttgtatttttagtagagactgggtttcacgatgttggccgggctggtctggaagtcttgacctcaagcgtgcgccctctccgccactgggtaaggcgggggcggaatagggggcttgcaatttcacactagaggcgggcaccgtgggggaaagaagagtcacgtctcccacggttcgtagaggaaggcctgcctgagcctggagcgggggcgggagagccacagtttggcatccccagggcatcccccagcccgcagactaccaggcctccagaggacaggaccccacccccggccacaggccctgcccccagcactccccgcaccccgcctccaagactcctccgcccactccgcacccaacttataaaaaccgtcctcgggcgcggcggggagaagccgagctgagcggatcctcacacgactgtgatccgattctttccagcggcttctgcaaccaagcgggtcttacccccggtcctccgcgtctccagtcctcgcacctggaaccccaacgtccccgagagtccccgaatccccgctcccaggctacctaagaggatgag

SEQ ID NO: 12883 - DNA, 2034 bp, Homo sapiens
ccacattctcctctcccctagatattgctgggatttgcaaagtttaacggtttctgtaccaaaagtaacttagcttaaaatacttgttccttgaaatgcctgggaattggtaggaaagcactttcaatcggtattagaaacaaacatctccactatgttctggacacgtaacgttctggaaacgaatgagagtgtattttccatgcacataatccccctccccacgcccatttctcacagctggccaaaccatgacaactggtttgtacgcagtccttgtgaaaaggatgaaagcgtcctagacaaccaaattaattcgctcttcaaaagcggtgctagacaaagcccatgactctagagggcactgaagagaaaaaagcacaactattctacaggggcatattctactattctgcaggggcataataaatcttaagaatgctgttcctttaaagaccaatacaaaagcaggtacgacctcagggcccatagtgcaagggcggagggcacacggacagcggctagacgccccacagaaagacaagtccggggacgacccttctgaccgctctttttacagccaggacccaagtgtcctaccggcctcgccccagtgcctctctctctcccacagcatactgctgttccacggcctcgaagcgaagaggtggtgaagctgagagaccctatccagggaacccgccagcgcgacgcggcgtctgaaggtcacgagccccgccgacagcccagacccagtccgggctagcccgaggcctccctggaggtggacggtttcagtccacacatactgggaccccagggagacactcaccagcatccgagcctgccatgtttcagaggcaggtcgccgccggactccgacgcggccgggaaggcgacggtgtcctggaaggaccgatccacgcagacccgacactggggcgcggacgcacgaaccaaagcgcggggaaggaggcgtgaaagaaggacggacgttaaaagagcttctcgccgctgattggtcatcagaggagcacttcctttcacaggacgtgaaacgggggcggtttgggaagtttagagaccattctccgccgaccaaaacccgtcaaaggattatcagacacgcgggtcggacggtccacatcagccggcagcccgggcgggtcccggggtgcgagcagcgcacttccggtgagctatttcgttttgtatccctccgccgacgtcaacgggaaagtagtgcggaccgctctctcggtggtccggggtggtacagccacgtgacaacgccaggccccgccttccccctcttttggttacagacgtgagggctctttggagacgtaaacatctccgagtggcgagggtgggcggggctgggcttgggaaagggcggggtggcttgcttgaggtgtggaaagaccagaagaaggtgaggtcaagagagtgcagaatgaggcattccaatggtgggtgggccctgacctgagagagtggcgcggggaggggtgaaagcgcggcgatcctggaacgccagcgggcgttgcggcctatgcgcgaggggcggggcgattaggtcatagagcggctcccagcgttccctgcggcgtaggaggcggtccagactataaaagcggctgccggaaagcggccggcacctcattcatttctaccggtctctagtagtgcagcttcggctggtgtcatcggtgtccttcctccgctgccgcccccgcaaggcttcgccgtcatcgaggccatttccagcgacttgtcgcacgcttttctatatacttcgttccccgccaaccgcaaccattgacgccatgtcgggttattcgagtgaccgagaccgcggccgggaccgagggtgagtttgggagccgagctgtcaggcctggcgggtggggggatgggagggcgggtcagggtggcggccggcgggggctttgcggcttggacttggcctttccgggctatcttgggacttcctttcccgaaggcttgcgccattttgatattcacgtcaca

SEQ ID NO: 12884 - DNA, 2032 bp, Homo sapiens
atggaatctgggaacttcatgggggcaggacagggaaggggctatggcttgagggagggactctcccactaggcacatccagcctcacccctgcctagatcaggcccatttggaaaaggggatctacatttgcagaatcatctccttgggcctgccaggattgcagaaataacattaactctttcacgcagccagagtttctgtttatcaaatgactaaatgaatgaatacccttgccggccctccagtggatgcctgtaagagttaatggattgttcagagtcctcatttagagccagggagtggccccagcaccatgagaggctgccttcaggatcctgcaggcaggcagagctccctgtccctttcgctacattccctgactccaaggcatccagccaagggtatggtccttcagaaacttctcggaggcctctgtggggccttgaccacttggttccattagcctctgcggggccttgaccacttggttccattagcctctgcggggccttgaccacttggttccatcagcctctgctccctgttccctggccactaagcacggggcctgtcagcaagggctcgcggaaggcctggcaggcagcaggctgtggtgggggaggcctgtgcccccttcccatcctgtgagcagggccgccttgccctggatttaggcgacttctctgaaggcaggatagtcggtccaggcaccccctcaggtttgggcctccagctagggtttggctcttccccatcctcatgtggccttcggcccatcgccctcagaatgctttgtttgtgctcagctgggtctcagagacccagtgtttgcgctgtcaatgttgattttttattttttcttttctttttgaaatcttgtttgcttttgcaggtcttgactcaggaaaacttagccacagttctgacaggagttatggttccagcaggggcagttactcaacctcttcttatccccatcagtattgcaggtcaagtggctggtcagcaggggctggccgtgtggacaattcctacagcaactgtggctgccctcccaggactgaccgctgcttctcctacggggggagtgttcaagccacctttagccggtctccaaggtaacggcaactcttcccaggactgcaccaggccccccaccctctactacacccccgcacgtgtgcttgccatgtcggactcagaacccacggcccacccagggcaaccgccctggagtctggatccggtgtcttgggcatccggccgcagagctgctgcaccacctcgggactgtaggccgtgacgccacgctggccccgcaggcctgccgtacttcggccagctgtctgagactgcccctctccccccacgccagaactcaccccatgaccggcctcctgggaaggactacaagaagattcaacgtctggttcttgaacctacacatctcctggccccagggaggggggataagagatgctggcgtgcgccagcccttcaaggatcaagggaatcgtggctgcctgccccactgagcccactgccccaaccccctctccttcttgtgccagatcccttgggattggagccgctgtgagcagtggctaggcatttgagcacctctgtctctgccttgctccatagcagctgctgtgctgaacaccgctcttccggcaccggtacaagctgccgcaccagtacaggcctcctcgacggcccaaccccggccaccagcccagccccagacgctgttccagacccagccgctgctgcagaccacacctgccatcctcccgcagcccactgctgccaccgctgctgcccctacccccaagccagtggacacccccccacagatcaccgtccagcctgcaggcttcgcatttagcccaggaatcgtaagctgctgccctcacccagggctgaccagggatggacggaatcatgggccaagggtggaactgacccttcccacagtggaggacgagccccccccgaaaacagcccttttccaacacatcagcagaga

SEQ ID NO: 12885 - DNA, 2028 bp, Homo sapiens
aacagatgtgccatgggattaagctccagtatttaatggcaggagccctgggtagcttcctgtgtcctgtggctggggcatacctagggctgggatagacgcaatatttctcaaagtaaatcagagtcctttgtcagtgggataaaatgctgattctcaggctcctcagcaaacctactgaatcagattattttggtgcaggggcctggagatttgcatttttaacaatctccccagaggtttccttgcaccctcaagtttaagaaccaccctttcaaagcgtgatttcatcacccaggagacatttggtaatgtctggagacattattggtcatcacgattgtgggggtgctactggcatctagtgtgcagaatccagggatgctgctacacatcttacagtgcacaggacagccctcacgacaaagaattatcctgcccaaaatgtcaatagtgctgagattgagaaatcctgaactccatcatatgaagggctctcaaggaaaagtacaagaagtggactgaagtcagtttgtgtcactaggtggctccttaggctactcaggcagggggctagcgttatgggcttccaggcccagttatcggaccaccaaattttcacagaactgggcagagctcacatgtattgaacccatgcagctgacactcctgaagccaccaatgcattatttgctaagtaattttttttcctctgataccaacacatttaaaatctttattgaattatcgtcacaaaattgcggtcatttcttgggggaaaatatgccattagttctacacaaagtactctttgctcaacttgcactttcttgaaatccagaaggtagatttacattaaaatcatgttggctaagagttgaaaaaagttattgcttatatggagttaagaaagcaaactttggaaattttttttggtctgagtttgtttctaagaagccaactacttctccagctctcctgcaatcctgccaaggtgatgtccagcttgtccctgttaataagttcaacagatcaaccctgtagggaagccaaaccatagagaaaggtggatgcactaaatttttttttttctgaacaaaatgtcagtgtgtattgttctatgacaatagtgttatttgaaattatgcctcgggccttcagtaggtaaagattcttgttcatttgctgcatttcaaaaaaattgtgtgcacgttcccattaagatttatttttcttaaattgaatatacagttaatctatatgcagatgaggtaggtaacaccctcctttctggattgttcgttttagttaaggtgttactcataacaatttggtttcctttccagtcttttgcaaaagtagggcttcagtgcaagatatccttttaaaaatacccttgggtcctgagtgttgaacttttctggctgaaataattttgcaccttccaaatgttttaatgctgttagggagctcttaaaatgcaaggatttaaggcccttagctagttaagcttttagcagaactagagctgttagataagaatagaactcatcctttacttttggagctttggacattgtttccagctgcttccagtcatttgaatcccgaaagcgcccctaatcctcgcggaggcagcctttctggctcccaggacccacccccttgcttctgattggcgaagctcctccgcggcccaagccagccacctacaacgtctctgagaactgatttgaaataagagccaggcggtcctcgcttccctgcgaccgacttttcataggctgggggagaaaaggttgagaaacttgacattgtctcgagcagagtgcgtgtagcaacagatcaaagaaaaagaggacgaaaacgtgctctttgctgcccgtagatttcgccgggttgcttttgtcttgcgggctcctgtcgggttcggtgtttccgctctgaagactgcgacgcgggctccgatgcagctcgctccctgccggatgggtcatgggattctaaacatgaggcaggtaagctcag

SEQ ID NO: 12886 - DNA, 2026 bp, Homo sapiens
ttgatccgagaaattagagcagcgaaaaccaccgtcactatgagcaccaccctgggcctggtgcccccgtcctgttttcaataaacttaagctgaccacagaggacaccaggcctcggcccctccctgggtcctgcggtcaggcccctcctggagaccctggcccaggagtggagaccccggtgcaggagtggcagccctggaggaggggctgggtcctgggatggagcgaagaggaacatggccgcccccattctggcccaggctcccctcccagaggggctgcagaaatgtactgactaggtcacccaagaaaagatagtacctttgttaggctagcatgcattttcctcagggcctaatttctcactgaagaagaaaagatttctcctgttgtccatttcttcatgcagctcttcaacagctgtttctcgaatgccaatcaaagccactgttctagggtctggggccacctcaaggcactaggagatgaggacttctgctcccatgcgccctcccgtctgctgcagggaggagtgcaatgaataaataaccaacataatgtgtcagtcacttgttttatccaccaggaggtaataagagctatgaaagagaaagctccgagcaggggaggggagtgaggcatggtacaggagagcaggaggctgtcctctaaaatacaggagtccaggggaccaactgggaaggtgtgggagggggagggagggagccccatagacacaggggagtgaaccacgttcactttgtcagtttttgatggcagctcgtatatactatttttttctccctcctgcccccagcccctcccagaaggagacttaatctgtcgctcaggctggagtgcagtagggtgatctcgactcactgcaacctccgcctcccaggttcaagtgattctcctgacttaacctccagagtagctaggattacaggcacccgccaccatgcctggctaatttttgtattttttttttttgtagagacggggtttcgccatgttggccaggctagtctcaaactcctgactttaagtgatccgcctgctttggcctcccaaagtgttgggattacaggcgtgagccactgcgccaggcctacaatttcattattaaaacaattccactgtaaaagaattagcttaggcctagacggaatgggcttcatgagctccttcccttccccctgcaaggtcacggtggccaccccgtgagccactgttgtcacggccaagcctttttccggccatctctcactatgaatcacttctgcagtgagtacagtatttaccctggcgggagggcctctcagatatgagtaggacctggattaaggtcaggttggaggagactcccatgggaaagagggactttctgaatctcagatccctcagccaagatgacctcaccacatgtcgtctctgtctatcagcaaatccttccatgtagcttgaccatgtctaggaaacacctttgataaaaatcagtggagattattgtctcagaggatccccgggcctccttaggcaaatgttatctaacgctctttaagcaaacagagcctgccctataaaatccggggctcgggcggcctctcatccctgactcggggtcgcctttggagcagagaggaggcaatggccaccatggagaacaaggtgatctgcgccctggtcctggtgtccatgctggccctcggcaccctggccgaggcccagacaggtaaggcgtgcttcttcctgctctgtggggccacagccagctctggcagcctccgccaggagccactgttttacatacatatttttgagcacctgttttgtgccaggtgctgttctaggcccttaaaagtatatccaatttacaggatcggcaaaagcaggtggagagtaactcagggtggcagggcccccggagaccttcgagaagtgcgacgaggagggggctgccttcagtcggggctgttttcctgtgttaggaagactatacaatcctcccaagtgtcatgtt

SEQ ID NO: 12887 - DNA, 2022 bp, Homo sapiens
aaaagcatctgaggtcacgctactcccctgcctaaaatcattcgccaacagccatcaccaacaggacacagcctgcttccctcagcaaggcaggtacagccactcctccaacatctgcccacctacctccttagcttcatctctgcctcattgtcccaaatcctgtgcaatagccgtgacatatgacaggcatctccatgtctctgcctgcctctctgtgcccagtcttctgtcaccccttcaatctgacctaatttgtagccctccttcaagacctaccttggtcacatttgtattttttattgtccccctccttcagcgtagtgactctacaacactttgtcaacctattataacacttaccctaaaatgaaattatttacaaatttgtttcttcaaaggcaagaccagtggcttattcctcttttgcatgtggcatgctcacccagcacagggacacaccaggctctcaaaggctgaaggaagccagaatacacatctctgcacagtgccaggactcttgggccaggctagcagcctgcactgggcactaactgaagcccttggggataagtatttgtaagtttgggagaaggaagacctttggaagaaccaaaggcagacctgggccaccctcagttaaatggacaacactagtccaggaaatgataaggaaaaaggctttaaggttcatctccttcagaggtttgcctgggctggccccatcatgggtaacttgtaaaaaataggtcgtgatacaatttttaaattattttatttatttttttgagacagagtcttgctctgtcacccaggatggggtgcagtggtgcgatcttggctcacggcagcctccacctctcgggttaaagcgattctcctgcctcagcttcctaagtagttgggactacgggcgctcgccaccacacccagctaatttttcttttttcttttctaattagaacagagttttgctatgttggccgggctggtcccgaactcctgacctcgggttatccacctgcctcggcctcccataatgctgggattacaggtgtgagccaccgcgcccgaccacaatattgtatttactgtattgcattgtctgcctccctgccacacagcgtcttccaggagcttaccagtcctctgtgcataccccagtaagtagctcaggcagtgcatgacgccctcacctttctctaggtattattgtattttaaagcatcacttcatttagtcctctcaacaacttttttccccccttcttctatttcacatgtgaggaaattgacgtcccgagggttaaagcaagttaccccatgaccgggctccataccctccgcgcccctttccctgcgcggtggctgtcccttctcggagtgcagaggctcctagtgctccacactctcgggctccaaggccccctaacgcgccgtgataaaaataataataacaataacaacagtgctgctttatttgcacagaaaacaggttgtttcggggcaaggtacacttgagaaggaggctaggaaccggagagaagcagcaggcgggggcggagggcgaagggagggaaggggagagggcaggggctggcaggcgctgtgtgccgggcgaggaggccggggcgggccggggcggggagcgggcgaagcgccattggcccgagcacccgggaccggccccaccgcaccgcccgccgggggcgggggtagcggggagggactcgcgcacgccgctctgcgttgacagtgccgggcgacacccgggccgtgccgccagcgtccgtcgggagagtgaaggctcgcaacgccttgcccgggggaaggtaacgcgccgcgcccggggctgcgcggtttgcaccgccaggccgagggctgggggccagaagacaagagagacggcgaggcgcgctccctgcccggcagcgactcggaggtgcgcactcgggttccagtctctacttggcccactcgctgtgttacctcgggcaactttgtttccctctcttggtctctg

SEQ ID NO: 12888 - DNA, 2020 bp, Homo sapiens
aggctggcatctaagcactacacaccagatcgtccgtgctgtggcttggggccagtttgggtgggtggttctagggccaggctgagctgattgctcgcttgttttccaggcccggcgggacgggtgtctgcactgttttccaggacccctcctgagggctgcaaaaagcttccaggcctccatgttgatggcagagcaggcaaggcagctcacccttcaccctgctgacttctgtgcacatttggggccacgttttcaacagctccggcactggagccaagataaagtcagcctaaggtttccacctctgtgggtatcctgcctccctgggcctggccctcagggcctgcctcaaaccctcacccacccagccctgcactcatggggacctaggcaccctcctgggtgggaggtggtgcgcacggggttgggacggggtcaggacagggttgtgtgtgaacagccgccctggtggattcatcccaggctgtaaatgaggggtaggtgtagaaaggcccacactgggaagggaaatgtttcccccctccttcttctcctaggggcctgaactcacctcctcagcccctgagactcacccagaacctcatcaggagaccagctaacagaacgatgagaacagttggaggatcttctaaagcctttctcttgcctcatagtttatttccttgcagaatccagcccctcagatgcagctgatgtcttagccaccacacacagcaaccttttttgtcttcacagttgtctctgaagcagcttccaactaaataaaagcagctttgtaaaggacacatcattgaggctctcgtgacctgtgccaggtgggaggaagtgacctctgctctatttcccagccctgatacccagcctggcatcaggcggggggggctgttgcctggttacccatttgcatttgtaatttatcagcgttctccaaatcataaaggtttgggttttagttatgcatgtctggcccctggaagaaaggctgaatgagatccctcagggaggtaaagctttggtccctgaatcatctcttctggacaaagaggcagccctcttttttggggggtgagaacagctggtggagatcctccctaccatgtgggcaagtaggcagcccaggactggcccctccaattcactcagctcacagcatccccaggtggcagcaacatccctatcttacaggtgagctaactgaggctccagctcaggtgtttcttctctggggcccttgagccaccctgctcatggttcccaagcgccagtggaggctggtcaccaggccccagggtgggatgtggggtgtgggccggggtgtacacttgccatgagctcccagtggctgggttgctgctggctccacatttgggcctacacttgggatccactcctctcaaccctgtaggatgggagagggacaggtgagggtctcagagtggaggcactcccccacctactggcagcatgtccagcttggccaggcatccccggagctgccgagccccccttccatcctcctccccatgttcctctctgttcccagcctcagtgccctggacttatgcccctggccctggccttactggtcagcggggaaggacgctcctagaacacaccacaccacactctgcagagacttgggtttgcagacagctctcggccttctgacacccgttttttcagctggactcctcatgcaaggcccggagcccttggaagccacccatccagtgcctctgccaccccatcaaaaagggtggtcatttctgtgatctaggcctggatcccacccaagataatccatgaccctgtacagtactgagtgtcagggaatctatagcaagtgcattgccttcacctgcaaaatggctgcagtgacagtcccacctcactccgagtcggggcacggattctgtgagatgtgggaggggaggccccagcacagagcaagggctgaggagctgggggtggtcacttgctgaaggctcactcagag

SEQ ID NO: 12889 - DNA, 2012 bp, Homo sapiens
agccggatgtcatttctgaataagaataaccacagagacatgaatgagagggctctccaaattgctggtcttgacaaagatttgcttcccttgcattcttccccttgatgcaaaataactgccttttattggactacacccagtttgactcacagaacttgaagaaattataacctagatgactagatgaacacagtaatctccatagaccataggagattgcagtggatggcaaagtgttactaaacaaaaggaggaaaggtcagatggaaagctgtacacttacgtccttctcctggatggtgcactccttacaataataggcatcagagaccccaggtcctccacagatcacacagcgcccctggtaagatccatagttacactcatcacatatgcgcaccagagtgcagggacgcacataggagtcacaaatcacacacttgccatcacctgtaaggaagagaatggagtcatgctcacaagttcttcagtcctctgctatctcctgccatggggaaatatactagtctcctgggaaatacactagtctccttttgacagtgactttagggccctcctcttggcatcacaaaacttggtttccccagtgtccatctcaagcccctcaacacatacaaaagtttaccaattaacatatgtgaagagcttagaaaagcacctcggagatgataagcctgtataattgctggcaaagtgctgtgtgttggggaggggtcatgctactctggcgattcttcccgttgaaaactagagagatacagcgttaaatgtgcaagcggcagtggggagttagaggggcctttggctaaagtgcagcattcagtgttcacatacttccaggcacatctactcaaagccctctttgtggcacttttgctggttccacagaaaactgggagtgggaagggtgggttgttgggacggtgtgttccactcacatttttcacacagtcttccgatggctgcaagatgaaagatggtaaaaagtacaattagaataaaggttttgagaaagaggagaagtacatcctcgagctgggggtagggacatgagtaaggactgcagtgagtgagacctgcggatagccattttatcattacaaatttccatatgaaccaaacctacatccaagcaccctcctgaatctcctccaacgccctgggcaagctcagagtttctctggacctggttcagaccccaccccccgatacctgcctggggctcccagcacgcgcacccccgccctcttctcatcagaggccacaaacctgcgcgctcctacaacaccccgcgcctgagaggcgggaaacgtggcgcctgcgaggcaagcccctaaggaagagacgggaacccccgaccccccagctcctaataccacccctgcccagacagccaggggtagggcgcagtctcaccaacaccagcctgcttgcggcaaaagatcaaatcaggatgatgtttagccatagctcctaactaagccggccaccggaagcttcgggaacttccgtccgacctttaacccccattgttcctgcctccacgtcgctgtgattggttctctaagcttccgtcagtttacaatccttgcaccaggcccgtcttgctctcgcgcgagtttttgtcgctgctgggcggccaggtcctggcaggtgcatgaaactcttaaaaactctcccagatttggatggcggagataactaaaatttgttcttgggtaaaacatctttgtgcttggtatctatttctgcaagtgtctttgggcagtccgatttcctcttgcgtgtctgttcgttgcacgtgagctccgcccattgcgttcacagggttctggcgcctctagggaggcctcgccttcaccgtgacgccccactcttccgggcacgcccctgcccaaaggctttaaaggcgccgtgtgggacgtcactttaatgcgacctcatctttgtcagtgcacaaaatggcgccctacagcctactggtgact

SEQ ID NO: 12890 - DNA, 1993 bp, Homo sapiens
aagtaaaaccaaagacaggcagcctggctccaggcctgaaaccaggcctgggcctgcctgacctaaacccagtagttaaaaatcaactcataacttagaaaccgatgttattcagagattccagacattgtacagaagaacactgtaaaaccccctgccctgttctgtttctctctgaccagcagtgcatgcagcacctgtcacatacccactgcttgcttaaatcaatcacgaccatttcatgtgaaatctttagtgttgtgagcccttaaaaaggacaaaaattgcgcacttgaggagcttggattttaaggcagtagcttgccgatgctcccagctgaataaagcccttccttctacaacttggtgtctgagaagttttgtctgtggctcatcctgctacacatgcacagagaggcaactggaggctgaggagtttcctttgtctggttgctgtggcttgctctctggggtggaggggtaggtccacaagggacacagacctgagccccacccaggttttggcaccagatataaggttcttgaattggtttgatccctgagagcatgccaacagacaacacgaggcagtgcggagcagcgtgctgttttaatgagtgcctgggtgcaggtgggctgaggcctaaaatggcatcagccccaagtgaggatgggacagtggttttatagttctctgtaaagagtaagtgtcccaatctaacgtgactgctatgtagtatctggatggcctcttgatcttcaagggttcatgtctccagccagggtaggtgtcttctggccggctctcttcctgcttctgctatcttgctgacacacgctgctgatgcaagcagccttgcatcttgggactgggcctgagaagggaggagttactcatcccttcaagctttcaggccccagaagaatctttgaaccccctgctccgctggccaccctcctaaaggatcactgtggtgccaggcaggaatgagctgcttgggtatccagagagctcccagtacctttctgctacttcctctacccctatattttgcttggcttggttctctaatttgactcagcttcacataaagtcaggaacttctcctgcaaacagaacttcagcttctccagtggggatgtgtattctggagagggggatcaccctttcccacttccattgttggggcactcacagtgtttgggatgtctcccaggtcctgcaggagcagtacgcttcctgcagagggtgtgtggatcctctcagaattgctggtctgtccttgcagttgacctgcagctaaaattcacaatgcaagcctctgcatgctgctctgtctggagctgcaatctagtcctgcatcccatctgccatgatcactggaaaaccctcatttattttttaaagggtccagaaaatgctaatctatagagatagaaattagattagtggttgcctagggtaggatggatgcaaaatttcagagtggggggttagaggctattgtatagaatcttttggagataatactgattattgtagtgaaagtaaaattctgtgaatatactaggaaacattgaactgtacacactaattggtgagtcatatggtatatgaattatgtgtcaacaaagttttagaagacattacttgcaccacgatattaaaaaatggcgtttgagttgtataattacttcttctctctatgtcaagggcaccgaacaggcaggagcctctcacctgccactgttcttaacagtattataaaataattacataagacaggttacttacgtattctaggtcataaaaattattgcttgactagagtaattgtaaatataaaagaacaccaaacacactaaaataaatatgaggtcaactcaaattttagcagttatattttaacttgattgatttttcctcagatataagtatgagaaatgacagaaagaaacaacaactggaaaagaagcactgcataagaccagg

SEQ ID NO: 12891 - DNA, 1986 bp, Homo sapiens
ctgtgagctctgtaacttgggctagaggcctgccctctctgagactcagtttgctcttttgttaaatggatgcattcccttctctggatgccatcactcaggtctctccaacaatcccagggctctggctcagagaaccgaggggaggttggtgtgaaggctttgggcatggtgacgcgggtgagcatctgacatgagcaggtgcacttgacctagagtaggtggaacacagtaggcatgctttacctagagcccctgccacatagtaggagtgctttgtggagagtgccttgcacacagtaggcattctttatgtcaagaactttacatagagtagttttactttatgtggagcacttgacacacagaaaaaacactttatatagagcatctggcacacagtaggtgtgcattatgtagagtaccggccacacagagtcagagtttatgaagagtacccagcatccagagtaggcacgctttatgtagagcacttgacacacagaaagaacactttatgtagagcatctggcatacagtaggtgtgctttatgtagagtaccggacacatggagtcacagtttatgaagagtacccagcacccagagtaggcacgctttatgtagagcacttgacacacagtaggtgcacttgacatagatcaccaggcacgtagtaaacatgctctacatagaacatctgacacacagtaggtgtgttttatatagagcagcaggtgcagagtaggtacactttacataagttactccgcacaaatttcactttatatagaggaccgagaacaaagaagcaagattttctgtagagcgcccagcacacagtggacacacttttcatagagcacttggcacacagtacacaacatgtatacagagtacctggcacatggtaggtgtgctttatttagagtccagtacacagtaaaagaactttgcatattgtcttttgcaaagagcagagactgacacacagcagctaaagtgctagctgccagccccttcccttcactccctcctcagaatctttcatctgtccccatctaaggcccattttcctgtgatccctcctctgtccccctctaaggccttatctgacatcccatttcccagatgggaagcctgagtccaggaggggctcactacccacagttagggcaaggggagggcagaataaggactccactcagggtcccccatctctgccctcctgtccctggccccatccactcatggcccctctcagccttacctcccatctcccctctctgtcctcctatgctgaacctagcctccaggtattctcctccagcggggctctttatctctaaaatctgaccgggtaatccccagcacagttagatagtttgttcctactcctgtcagtcatgtctcgacccaggccctgggttgcctggaggcaggacttgaactcctgccagactgtgaagccagaggccaggagcttctgtctctgaatctcctaagtctgcactgagaaatggtgcatgatgaactcctggaccacatgtggagaggagctcagaacatgatctggcacaatggttggcctggccccactctcttgccacctgaactctcaagttcatgactttatctgccacactcttgccttggaagggcaaggtggctgtaaactttggggctcagagtcacctttgactcttcctcaagatcccctcccactcaggtgtgagatgttgagacctgcggatcctgtgcccatgctgtgtcaccctgagctggctcctctgcacccagctggccctacgccaggttttggttggttgcccaggcttggaagacacacccagtccatggggattggctcgaccagcccagcccagcctcgcctcccacagccttccggaaatcaggggccagaggcaaagacctcctagcagagggggagaggagggtatgtgggacaagctgcttctgataggag

SEQ ID NO: 12892 - DNA, 1955 bp, Homo sapiens
tcctgagtagctgggattacaggtacccaccaccacatctggctaatttttgtatttttaatagggacggggtttcaccatgttggtcaggctggtctcgaactcctgacttcaggtgatccacccacctgagcctcccaaagtactgggattacaggtgtgaaacactgcacctggctcaaaaccctttttataacaaataatttcaaatggtctcttagtttttctgaactggaattcatgaataatatagttaacttacatatgaacgacataactcactcaaaatcagtgtaataaattccttaactctgatataaagaagaaataaaataaaagcaatttataacaaaaaaagtctgaggtcgggagttcgagaccagcctgaccaacatggagaaaccccatctctactaaaaatacaaaattagccaggcatggtggcacatccctgtaatcccagctactcaggaggttgaggcaggagaatcgcttgaacccaggaggcagaggttgcagtgagccgagatcgcaccgttgcgttccagtctgggcaacaagagcaagactctgtctcaaaaaaaaaaaaaaaaagtgtttcaacatataaatgttcaggcacatttacaccaaaaaccacaatgaagtagtcagatacaaaactgctatgactgggatagctacaaatgcaaactaatagagatatattgtcccggagattgcactgggagcagcgtgactgtggataatgtgtgtttccaaagcagtgactaaaggtaaggttctgaacgaagcaaagaacgcttttccctgaattttcacaaaagttgagttcctagaaatctggtgtgtattaaaactgtgcaaacaatactttgggtataaaaagggggctgggtgtggtggctcatgcctgtaatcccagcactttgggaggccgagatgggtggatcacttaaggtcaggagtttaagaccagcctggtgaccaacatggtgaaactccatctctactaaaaatataaaaattagctgggtatggtggcgggtgcctgtgatcccagctactagggaggttgaggcaggcaaattgtttgaactggggaggcggaggttgcagtgagccaagatcatgccactgcactccagcctgggtgacagagcagactccgtctcaaaaacaaacaaacaaacaaaaaactctgtgtgcaaacaggaattaggttccaggctcaaataattaaaaatagattttttcacccaccagactgcctggcagctctttagaaagttgtgtgacgtatgaaccagttcttccctatatgagagtgtaccgtacatcgcaggctgtccagcatcgaccccactgatggatgctagtagtcctccccgccagcactcaacattgtgacagtcaaaaacatcctctctacattttcaatgcccctgttggggtagcaggactcccactgagagaccccagtagagatggtaagtggaggcagagcagcacctctcacacttccatgtgcccttgaatgcccccacggatcttgctaacatgcagatttaggatgtctggggtggagcctgagaatctgcatttctaccagctgttcttggacccaggctggcgagatcagaggaagaagaaatgaccttgggtttaggtagcaaagacttcacagaaaagaagggaacataaacaaggttttgaagaatacatggaggtggagctgatgacatcccacgaggtgcaggctgctgggaggcaggcacactggaccagcggagagggatccgtacgtagcaaactgtgcccatagtgagcaaacagccttgagccaacagcaacagcactgctgggcacagagggtaaaaataacaactccctactggggttgagtctgccagaccctggcaaagttcatttctttcaataaatccagcagcgtc

SEQ ID NO: 12893 - DNA, 1955 bp, Homo sapiens
gcacctctgacttgtgctgagtaaaatggacaaagccagcaatgcacccataacccagattcttgagacaccgctggactttgggaatcccaggcattaggctcgtggcagtgtcatcatggctaggctgggggcagtgtcatcatggtgcttgctggccaagtcaggacacggcctaagccggaatctgctggtgctggtacaagcggtgagtgggcgtgtgggtgggggttgcggttagggtgtggacatcccagaatccaggacgctgttcacaattcgtccatactccctgctcccctcccttacagcacttccctcccgaggcctcctgagcctctaacccccagataaggaaaggggtggactcagttgaagtccagtgtccactccggtccaatcagctctacctggggtgaggggaaactcctctggctgggctgctccctctgcagggctgtggctggacagattactcaagaaaggaagcaggtgggccggaacgaacccacggtgccacataggcctccgttctcatgcatataagtttcccacactcaggcaggaaatgaaaatgcttcttggacccccaaggagagtaaaggagaggggaagaggaggaggatttttcggggctgttagtgacactttcagcctcctgtgcatttttgggagggctgcaggagaaggcaatgctgcgcccctacccagaactagcgagcgcttcccaactggcctcccgccttcctctcgtcctctacggcctccattggcagctgtgcaagggcccggccctgcctctgtctctccacactcgctgtgatacctcaggcctcccaggctccgccacgcccttccctctttcgggaacagctgccttccatcaccttggctgcctggctaattcctgctcattccttaaaaccctgttttgatttcgcctcaataaaactctgacaccaccctccagtcataattagtcacttcttcctctgtacgttggaaacaccgctttatcgtggagactttaaggatatccaagtagagagaattcttccgtgcaagttttgcatcctctcaccactgcctgcgttacccgagttgtaaagggcggctccctgtgtctgccccgctgcaccgatacaccgagctgcgcacggtgcccagcgcagggagaacaaatgatcatctgtccaacgcgcccatttacaggtgaggaaactaaggctccaactcaatcgacgcactctgcccttttgattaccagaaaagtagcaggacaggtgtcctgtcccgccctaccccggcccactaagccggcaccccggctccgacccccggctgtgcccggcgccgccgcggtgcccggcgccgccgcctcgcccggcggggccgcccggagcgcccgcacctccgcccgcttccacctggccgggcccgccccgcccggactcgggactgggaagtgcggcgactcccggaaccagccattggcgccagcgcggggagctgggggtgcagagctgcgggcgcggcgggccacgcaggcggcccccacccccggcctggcctggtctggtctggtctgcgctgccgcgcgggggcgccccctcccaggcccggcgcccgccagccccgctccgccaggtgcagcgcagcgcaggggtgggcgggggtggggctcggcgcgcacgttcacggggcggggagggggcgggtcaggggcgggaccacagccggctgggccggggttctatgcgcatctccggggaggggcggggcgggggcggggccggggcggggcccggtcggtgcactccagacggcgggccgccccctcttcccgccttcctactaccggcccaggattagcgccctgggagcgcgcgccccgctgcctcgccgccacactttcctgggagcggcggccacggaggcaccatgaagaagtctta

SEQ ID NO: 12894 - DNA, 1954 bp, Homo sapiens
aggcacccagaattattcctagcacatagcaactgctctttgactgttgtttgatcaatgaagtaataaaaagagagctgctctcttttcctgcgagatggagaattttagtcccaagcgccatctgccaggctggctaacccagggccgtggcggacagtccacaaagagttcactctgacccggcccctgtgtgtcattttccaggatctccctctacacctggcgcctcgcctgctgcctgctgggacatggcctggcctgctcagctgacctgctgccacttctaggcagccgtcatgtcactttgctacaacttcaagctaagacaggcaatgttttgggagatgaatctgttttctgactggccagggatgtgctgcagtcccctcccaggcgcagactggataccttccaagtacaaccttgaaatggagctctgggtaattaatgctgtctcagtagtgttattagtaattggtctgcagtgtataccgagagcatgtgtcaaatattcagaaaagcgtttgtgggtggtcagggagttgtttgagacggtgtcctgcattgaacagacctgcctttacgctggaggatccctcaacagctctgcctgaaaacagccatgcatgcacaggaggaaaggaacttgatagccttgtggccagttctgtggccgctttatcaaactaaagcttttgcaaatggccatgctttaaaattaggaatttcagaacccagggaaaggtcgattggtggctaatgccaattctaatgaaaagtggattggttgtcacaaatgtagactagcatcctaaaggcaaataggcggcgactcacaggctgactgaaacacgtgttctccgggaagcagggccccgagtcttctctgacaccctcattgctgcacctgcccctgtgcccgcggagtccatgcggtgcagcctggcacaaatgcagcagtcgctgggcgtcccgaggccacatggagaacctcccggctggcggactgctcccagctgcgaccatcgggcccttggcctctgcgaagccggggccatttataagatgacactgagggaactttggattcaattctgaggcattcttcgagatggacacttgtaaatgaatgcaggcggtttccggtgccccctggcgacggtgcagcctttcccccatccgcgctccctccagctccagccgtgcgcagccggccccggccaagtggggctgccgccgagtgcgccccctcccgggacgcccaccctcgtgccggggggcggtgctgcggcggcgcggggcgggccgcgggggcggggacgctgggcgcaggaggcgcggccgggagcgccgcgcgccgggagcggggcggcgggcgccggggctggcatggcgtggccctgtatcagccgcctgtgctgcctggcgcggcgctggaaccagctggaccgctccgacgtggcggtgccgctcactctgcacggctactcggacctcgacagcgaggagccgggcacgggcggcgccgcctcgcgcaggggccagcctcccgcgggcgcccgggattccggccgggacgtgccgctcactcagtaccagcgggacttcggcttgtggaccacgcccgccgggcccaaggatccgccgccggggcgcggaccgggggcgggcggccgcaggggcaaatcctccgcgcagtcctccgcgccacctgcgcccggcgcccgcggggtctacgtgctgcccatcggcgacgcggacgcggctgcagcagtgaccacgtcgtacaggtatgggctgggtagggaccgcaacgagtccccaccctgtggtgggaggacgcggaggcccggagccagagggatggggtgggcggcagagcggaggcgcctggagcccggatcccacgcgacctcggagctgccggcggcctcagaggtcacccccgttt

SEQ ID NO: 12895 - DNA, 1953 bp, Homo sapiens
gggtttctgctcatatctgctgtctccaagaagctgagggcagtggcctcacttcgaggaagtggtgacactgcgggccctcctggttacaaggaccgggcactgttggaccacgtggctccatcatgatgactccagttagatgtcaccccgcccctgagctcaggtcttgctgaataaggtcaccgcccagggggcagtcgatgaacacgcgcgcgagggctctgcgagtggcctcgtgactttgtccctaactccgggtgtcccctccttcccatcagcgtccggcgcctggtcctggtcccggtccccgaggcccccgggattcttcccgagcgttttccgagttggcgcggggggtggaggcggggccatggagcgcgtcccggggaccgttgcatccggaggcggccgtcgtgcggctccttcccgcctcgagagtgaggtggccgggccttgacgagaaggcccacgcctgccgcgggggtggctcgcgatggcagtcggggttcgagtcccgcctggggggctgctcctgctggagaaaacgcctccctgagggcggcggcaaacgcgcagcgaggccccgtgccgcgccagaagccaccctgagaaaggggcaccgggacaccgaggggttcccactttctcctcagcctgtgacgcccgcgtcctcgggtgggttcgaggggcgcctgggcacggccagccgaggctctcgagagccccagtgtcgttttccacctcaggcctcctttcctgaggcagagcccgggacctcgcgctctcgcctcaggctccggcccacgctcccgcccggccgccaggcgcgcaacggaaagcgcccccgccccgccccgctccgcccactgcgtgacgcgcacccggccgagccaatcagagctcgtggcgcgcgccccacacgccggccccctccgcccctcagcttaagaaagggcgcgcggacccggcaggccagagtgccgagcagcgcggtgggtgcggctgtgagacggcaggagacttctgccccgcggtgcacgcgaccctcgagacgacagcgcggctactgccagcagcgaaggcgcctcccgcggagcgccccgacggcgcccgctcgcccatgccgagctgagcgcggcagcggcggcgggatgctggcgctgctggccgccagcgtggcgctcgccgtggccgctggggcccaggacagcccggcgcccggtagccgcttcgtgtgcacggcactgcccccagaggcggtgcacgccggctgcccgctgcccgcgatgcccatgcagggcggcgcgcagagtcccgaggaggagctgagggccgcggtgctgcagctgcgcgagaccgtcgtgcagcagaaggagacgctgggcgcgcagcgcgaggccatccgcgagctcacgggcaagctagcgcgctgcgaggggctggcgggcggcaaggcgcgcggcgcgggggccacgggcaaggacactatgggcgacctgccgcgggaccccggccacgtcgtggagcagctcagccgctcgctgcagaccctcaaggaccgcctggagagcctcgaggtagcggcccgcggggagcgcgggggacctggaatggggacgctcccgagtcgggggcggaagactcgggaggatggggaaagggggcctggccctggggagggtgtgatcgtccgtgggggtgagctggacttgagggtgaaaggcggggatctagatcctgctcgggaactcccctgcgtggtatcccttcccacaccgctgctcttgctggaaggaaacgtttaaattccacccccgcgcgtcgggactgccagcgggatccgccgagcacttcccgaggtccgggctagcgaacccagacggccaagccgcgggcgccaaatacccggggacgcggtagcctctatcctcttgcaaatctccaaatctc

SEQ ID NO: 12896 - DNA, 1859 bp, Homo sapiens
cccaggcttaagtaccatgtgtcatgggggattcagagggttcaacaggtggggggcacgctgtcgtggcaccctggtgacaacaggagaccaaggaggggcaggtcacctggccctgggcatgagggagggggctgcacaggcactcaggtccccaagctgtgtctcccaggcactctcaggcgtggggtgtaaagatgctgatgccagggttccccatgaacacagacccccctaaacaaggtaaatggggtccacacaaaagttgtgggggatcaggcccctgccatgaggtccccaaggcccttgggagatgaggtcaatgcggggaggaccgggagaacccccgtcctctgacatggtggctgcagtaccagccatttgaggagtgggttacatgcccccagacttccaggtgacgggggtggccacccagacacttcaagacatggggttttcatcaccaaaatccagatgcagattctcagaggataggaactgagcccatggaatcagcaccagccatgttcagagggtgcagacccccatgcccaagacggagcagagcctcccagaggctcggtgatggggtgcagcctccacggaggctcgatgatggggtgcagcctctctggaggctcaggtcatggggtacagcctccccggaggctcaggtcatgggatgcagcctcccagaggctcggtgatggggtgcagcctccccagaggctcaggtcatggggtgcagcctcctcccagaggctcggtgatggggtgcagcctccccagaggctcaggtcatggggtgcagcctccccagatgcctggttgatggggtacagcctcccgggatgaagaggcacagacagtatgcatgaaaggtgagtgtggcacacacaagctaagacacagagaatgggcatagggcatcccaaagcacagagaactgtggcaagctgagttcccccatccccggccatcccgggccccagctgatgagggtgccccagccctgcagggctcagcagctggggtcagagtgggtggggcaaacacgcgctcacccagcacacttttctttgtgtgccagtgactcctggctccccagagccagcgcttgctttgcagtccaacctcaagcattccccaggcgacctcagaggaagcgtccccatccaggagccccaccagggtctccatgaggctgctggctgccaagccaccgtctcggggcctcgggactggcctcgggctccagctctgtttggttttctccttcctgccctggaacctcagacgccagtctggctgtgaaggcgcccatatactggggaaagtacaaagcccctacacagctggctgcagagaaccgcgcgcagggcacgtagctcagctgtaccctggggccagcgtcgagccaccccctgcatgtgtccccttgcttgcctaaaagccccactagggcagcctctggcccttctcatcccagattgagtcagactaggagacagacccataccctgtgcaaacaccagaaggacgtacaagtccccacacgcccagggccgcgtgtgaccggacgggcccagacgtgcacatgcatgcccacacgtcctcctgctgtggcccgaaagcatcctcggagcctgggctatgtcctccacacttgctgcctgaccagccccgtggggccggccccgctgggacaggttttcccgttaagcattaaccaccagcagataagggctctgagggaacgccctgacctgggatggctgctcctcggtaggcccaagtcatggatctgactagagtgaccagaccagactaactggcagagcagagggagaggagcttag

SEQ ID NO: 12897 - DNA, 1800 bp, Homo sapiens
agctttgtgatggtctcttccagagaacagtttggtcccaggacaacccttccttaggtacccagcaaacaggggccagggcagtgaggggtgaggaatctggagacaggacaggggccatgcaaatctccctggggccctggggaccagccataaaaagagatgagtggttcctccaggttttacagttgagctctccaggttagatgagtagatgcgagtgcaggacctggtcaggcataaagccagttcctgctccatggtcaagtctcgtgttccactcaaataacatggatcagaactagcaacaaagttctccacagggagaaatcatatttgtagagaagccgctgccagctgcttgggtgaggatattttatgtagttttttagttgattaaatttatttttattacaaaataatgcgtgtgactattgaaacgctaatgaggtgtatcaagaaaaaaataacaagtaatccactttcctgtctgaagtaactggttctaatagtttatcttccatacaatttctgtgtttatataagtacatatgaacagttttgaagttttttttacacaaaatggaacgttttttactatgttagatgtttattttaaaaataatatataaatatatagatagaggcaatatataagtagatttatataagtagatttaacccatccttggaaatagttgtatattattttacacagagatcatcattatttatccatcgctcccttgttaatgaacagtctcaacgatttactttgaaacaaatcgtcctgctgcactctgagggcgggcgtctgggtctccatcccggatctggggcggcatcttggggtagaaactgacacaaagccgggcctctgcggtccgggggcggcggccaagctccgcctccacccgcggcagccaatcagctcccggggacgccccaacccccaaccgtctgcactgcagcccacctccccccacacgcctcctcctagccacttcactaccaatttgcaaattcccaaggcgtctgccccagcgccttcccacatctctgtggaagactccccactccaaagtagcctggtgtggaaattgctggacgaaagggtgagtctcgtccaaagctggtttcggggaccagaccaggcccgggcacacggaccaattcaggggcggctcccgatgcagtccgctgaggtgcgggtgggagaaggaggcactgggtcggggtccttggggagcgcggccgaggggggcgcacgcggggctgccaaagtggtcgcgtttttggcctgggacccccttgggttttgggtccagggaggtagatgtctttcaaaaagggttgcctgcgctttctccattgctgtttctatttcagcttctttctaccagtctcttatttctttcatactgcatttcttctccaggaacataaccagcaacatattttattttattatgaaatatatttcaaagctacgcgcaggagataatatgacagatttattatatgctgacattttatcacctttgcttcagcgctccctctcttcctccacccccctttctttctaagaaataaaacacttaaaaaccccttccccccaccaaatctcatgcccccatcctgagaggtaagttagcttgcatcccttaccttgtatattttgtcctttattattaatgtttatttttaggtatgcgtttttgttctgaatttaaaatttttgcacgagattcagtattacagggttttaacttgcggtgctgttagtcctgacattgcaga

SEQ ID NO: 12898 - DNA, 1799 bp, Homo sapiens
agtgttgtctctcagacccttggctttttcaggactgcctgacctttctttgtccttatttggcttcaagtcaagtcagctcaaccctgattgagcaccggcaatgagtcatgtctgtgaaggcgacacagcccctgtccttgaggagcttcgagtccagtgactgtcacttcagtggaagttgggctggacacagtcacatgtgtatgccagacatgaggctttgttctcattacaataattgccctgcattattctagcaattaagcttctccacgtgtgtggatgcatgttcccaattttttctggcctctaccgaacacaatgttaatatttgagagcagtcctaaaaaattaaataattatacaaactgaattaggatagcataatattaccaatcagagtaatgtggctttgtaatccagtgtgatgtcatatgaatctacaaattaggaagcatgtcagaggaggaaaccacatcctttattgctttgccttaaatagcttaaaactaatcttttccatgagccaacagctatctctcatgtttaataatgctcctccctgcccagatgaagctaactaaatgatgttgccccctgcacctgcaaatgcctggtgccagggcagggacacagggaatggcagaaggggagaccagatgttggctgaggcattgatttatgggcatgaccttccatgtgccccgaggatggctgagaccagggtttgatgaatgcagtgctctgtgtgagaagttctaaggtgacaagcaaagattctatcctctggaggggcaagccctattattaggttggtgcaaaagtaatcgcagtttatgcagttgtaatggcaaaaacagaaattacttttgcaccaacctaataccagacagaggaggtgcaagtgcatgccaccagggcaggtgcaggtgatgggggcagagaaaactcagatgtctccaatctgtgcagagtagggaaacagaaaaagctaagtgaggaaagtgagattgctatcacacagatgcatgtcttaggttttctgattccattcctcatgaatttcattaagtaatcaaagtgctaagcatgaaatgtgggtatgctgtcaccaggtggcagcagcatccactctccaaaatgcattttgttcaaacctagtatgtgctgggtattctgagcacatagcagagactaaggcaaagagtccctggcactgtggagcttagaggctaatgaggtggcaggtgcttacactttagaaaccgttgtgaggaatagctagtggtagttaaatgatacagtgatagttaacagagaggaaagcttttctctcactccaagctatatttttattatcactattaatataaatagaaaataaatattaaaatagttattaaataagcaaaagataatgttgcatttagttatacgattaagtagaggttttcaaatattttttagctttgtgcaaccgaaattatatgaggaagcaaaaaccacaaatacagaaaataagaacttttctgtttgaacagaaacgaggacactggggaggcccttccaatgcaggccagacttttaggggctcgacagaacacagctggagaaacatccacaccacacgcggtttcacctgccacacggcagcccgggtgcccggatcactgtgtgtggagactcaggctcaccggcaaacctcttccggttccggtcagggtgctgcctccctatccactgggagtccttttgcgtttcagatgctcccaggctctcccgcagtttaaagactt

SEQ ID NO: 12899 - DNA, 1797 bp, Homo sapiens
aaagtgctgggattacaggtgtgagccaccgcacccggctcacagaatttcttaaaaagtcattgtgttcagtctttatggatcctctaaattccagctgctcagcctcccggagctaaatgagatcacttaaaggtcgactgttggggcctccaaggtcgcctcggagactcacctcataggcaatcaaatggatcgctgggtttttgtgtgtgtgggttttttttgtttattttttttttccagaaaaacactccaccaagaaggtttttataacctactggaggaggaggatggagagtgggcacgaaaggactaggatgaacatgccataagcaatctaaatgccactgcaatattgcctggtgaggacctgattactgatgttttaaagctaagctttcagttgtcactccacccagtagtgaaacaatgagctctaaaatatatatttcggctcaagctttcttatgtggggaggtaatccacccgaaggtatccccagcctgtacctaatacagtgcccagcactaaagcagctcagatgccagtgaatggtggccactgggaggcctgtcagtgggtgccagtagcggtctcttcagagaaaaagaaaactcccctctgccagatcagtattttatgagctgtgaaccaaaaccattgctaccaccatcactataattctatccacagtaattatcataaaggcctaacaatgccttgtagatgaacattctgagtaactgctctataaccaggagatttaagaccgcaccaaaaaccagtagagggttatactttactgggcacaagtcgtttatgataacgaaattgtagtttaatctgtgaagagatgtgaatgtaactgagacacgcttaaatggaatatacagatgagctttatttttatatctggcatgcttggatccatgccgaccctccagctgctcgggcctgcccttaggggctatggaccgcatgactctatcagcggcactgccaccgccgccgcctccgtgctgcctgcgttccccgaccattgattgggcccggcaggcgcttcctgggggcttccctaccggctccagcccttgggattcgggagcgccctgctaggaagccagagccccgcaggggccgcggcgtccaggccgcctaacgcgcgcccctcgcccggcgccccgaagcggccccgaggggcgggagccgaggcgagcggcaaggccgggccgggggcgcacagcgcccctagaagtgcgggcttcccccacccccggcagcgaccctacctcccgcccccgctgcgtgcgcgcgtgtgtccgtctgtctgtatgctctctcgacgtcagtgggaatttccagccaggaagtgagagagtgagcgagacagaaagagagagaagtgcaccagcgagccggggcaggaagaggaggtttcgccaccggagcggcccggcgacgcgctgacagcttcccctgcccttcccgtcggtcgggccgccagccgccgcagccctcggcctgcacgcagccaccggccccgctcccggagcccagcgccgccgaggccgcagccgcccggccagtaaggcggcgccgccgcccggccaccgcgcgccctgcgcttccctccgcccgcgctgcggccatggcgcggcgctgactggcctggcccggccccgccgcgctcccgctcgccccgacccgcactcgggcccgcccgggctccggcctgccgccgcctcttccttctccagccggcaggcccgcgccgcttaggagggagagcccacc

SEQ ID NO: 12900 - DNA, 1797 bp, Homo sapiens
tacacaattgacccagtttgcaggtgggaaatgggaagccagttctgcaaattggcctttctgttctgtgaagtgccatctgtcggtgaggagagattagggtctgcagcgtgaaaatctggaccatactctgggtaatcaagggagaggttatcggctaatgacaaattaaaggcttactttttagctggcaactgaatcaccataacattttatgttaccagttccaaaattttggggggaattcactcaagcttgggagaggagagatcataactttaagagtataagaggtttaaacggtccactacgaaataaatagagaaggaaaagttatcagctggtaaatatcgtagaaggtagagcggtccagggactcacaggtctcactaaagaaaagtctagcgtaggttcacggcacggagagattttaaggctgcctaagactaaagccaaatacgaagtccacatctgcggtccgcaccttatctctccgcgcggcaggcgcgacgagggcgagaaactccctctccagtggtcgcaccacacgacaccagggaaggggcccctctctccagaccctcatatctccaggtccaggccccattttcctccgctgacagctcagcagcgtgcgcttccgctggattcaggccaggaccagcgaagccgcaccttacacccaccgaggaggaaacaagcctggccacccgaggctaccccgctaggccgcgggtagtgggggagggggcgctgaggcaggaggtcagcacccgggcgcgggctcccgccccacgaaaagcgcgcgctccaagccccgccgccggagatgcggttccggtccggacgcctgcgcactacggctctccccgcagcctctggccctccttccccctcccccagtcagggcgcacccttgcgcctgcgctgtgtgtgttcctggtctgcggcagccatgctgaactcgtatggagaggcgagtgggggggacagagtccaggactgcgggataggaagctggggatatggacaagcagcagcgttatagcgctctgggtttcgggacataggcctgggccatgcggcccccttggccccttggcgcgacccccaggaacgttcggaaagctggtcctcgtggctgggggaaaggcggggggtgggggggaagcgggcacgtgaccccggtcagccaatctgggtgctgctgacgtggccgcgcggccccgatgctctccccacccccccagcccgttcgggaagggaggggctgggggctacgccccctcccccagcacggcttcgttttctgggggggggttgacaccccggattacataccccgtaccaagccgagggcaactttggaggccccctggaaggctttaggatccaggtgagaaggggcccttgtggggcggagatgtcagtcaagtgcttaaccaatggtggggagtccgggagggggattcttggggttcaggaaagaatcctgagagtgggaagatttgtccttcaaaccttttacagccaatgggagcgtggagggggggcgagcgggagagggccatggggggggaggggaatggccagcctcatgcctccgtacccattggagggcaaaggggttagggggcggtgtggccccccctattccattcgtcccctgggggtacagcagccgggagccaggtgagaagggatccatcggcggccgagggaggggtgacctggcggtgggctgaggagtggtggctgtggcccctacccgtggatgtgaatgctttaggagttggc

SEQ ID NO: 12901 - DNA, 1796 bp, Homo sapiens
ctcctgcaacaggaaaccagtatagacccagaggacacagtagagaggaacccacggacatatacacatagagaggttcaggtgcacacaccgagaaagtgcaggcaggtagacagcaagaagataactgcccacagagaggacgggcactgtcgcaaaagggacaggtgaacacgcacagagggatctggcttggttacccccaggggctcaggtgggcagggtgggtcaggaaggcttacctctctgttattcctctccaaaaatgctacggctgttgggctgaccatatggtccttcatttcctggaggtaaggacagcattagggaggaaagacactcaggctgggcgcggtggctcacgcctgtaatcctagcactttgagagaccaagccgggtggatcacctgaggtcaggagttcgagaccagcctgatcaacatggtgaaaccccgtctctactaaaaacacaaaacttagccgggtatcgtggcaggcacctgtagtcccagctactcaggagactgagacacaagaatcgcttgagcctgggaggcggaggttgcagtgagccgagattgcaacactgtactccagcctgggcgacagagcgaggctctgtctcaaaaaaaaaaaaaaaaaagaaagaaagaaagaaaaaaaaacacactcaaaccttcccccactccccgcctgcaggacctttcctgacctggactgcctctcgcatccgctccacgaacacctttctctcctgcaggtccccggctgggagcttgaacttgcctgggttggcttccactatacgtgggctgagagtcaagggtcaaggccggagccagatatcatccccgtccctaggggtccagccctacccgaaggtgggctgccaccgcaatgggctctcccatgccaccctctgccacaaagccccaggatatcgatggtctcttccaggtcctcgaggtcccactcgatgctgcgcaggccattccgcagctcattggtcgtccagtccagctcctcgcgtccgaccgccgcgctttcctgcaggagctcgcaccagcgctggtacagcccgcgggccgtgttcaccgccttctgcacctcgctgcgggcaggggcacggcgggcgcggctgggggcaggcggtcctcccgcctgcctctgcccccgactgcaaacccaaacgcatgggggactccggagacccctatatacccctgcgtgcgcctcccactctgcaccccgacggccttgcccagcccgccgggcacgctggggccggcacccgggcactggctggcttgggtacagagcaccctccgccctcccccgtcgttgtcactcaccctcggactacaaaaaaggggtcttcgagagacatgtcagtcccttcccccccaggccgaacccccctcccggcctgggttcgcgggctggttccctcccaaccgaggagaacgcgccgccacccccgcccccgtcacgccaccatcgagagccggaccgccaggggagaaagagaagcctcggaggcccgacgtgcggacacttccgccctctcctcagccatcttggttgtgggcagaggcagcttccggtgcacatgcccccgccccttagccctctcgtgccgcaccgtagggggcggtgtcggagttctgtctgggcctattcgggtccgagttcggaatttcggttcaaggcccagttcctcggattgttcctgcgcaacttcagtttcccttccaggcacgggcaatgtaaataatgatagcctccctcatctctgg

SEQ ID NO: 12902 - DNA, 1794 bp, Homo sapiens
cagcgtaagctgctctggttttattgaacagatgaaatcacattttttttttcaaaatcaaagaaatcttatagagttaacagtggactcttataataagagttaacaccaggactcttattcttgattcttttctgagacaccaaaatgagatttctcaatgccaccctaattctttttttttttttttttttttttgagacacagtctgggtcttttgctctgtcactcaggctggagcgcagtggtgtgatcatagctcactgaacccttgacctcctggacttaagggatcctcctgcttcagcctcctgagtagatggggctacaggtgcttgccaccacacctggctaattaaattttttttttttttttgtagagaaagggtctcactttgttgccctggctgatcttgaacttctgacttcaagtgattcttcagccttggactcccaaagcactgggattgctggcatgagccactcaccgtgcctggcttgcagcttaatcttggagtgtataaacctggctcctgatagctagacatttcagtgagaaggaggcattggattttgcatgaggacaattctgacctaggagggcaggtcaacaggaatccccgctgtacctgtacgttgtacaggcatggagaatgaggagtgaggagccaccggaaccccatattgtttagtggacattggattttgaaataatagggaacttggtctgggagagtcatatttctggattggacaatatgtggtatcacaaggttttatgatgagggagaaatgtatgtggggaaccattttctgagtgtggaagtgcaagaatcagagagtactgaatgccaacgcttctatttcaggaacatggtaagttggaggtccagcttctgggctcagacgggtatagggaccaggaagtctcacaatccgatcattctgatatttcagggcatattaggtttggggtgcaaaggaagtacttgggacttaggcacatgagactttgtattgaaaatcaatgattggggctggccgtggtggctcacgcctgtaatctcatcactttgggagaccgaagtgggaggatggcttgagcccaggagttggagaccagcctaggcaacatagccagaccctctctctacaaaaaaattaaaaattagctggatgtggtggtgcatgcttgtggtctcagctatcctggaggctgagacaggagaatcggttgagtctgggagttcaaggctacagggagctgcgatcacgccgctgcactccagcctgggaaacagagtgagactgtctcagaatttttttaaaaaagaatcagtgatcatcccaacccctgttgctgttcatcctgagcctgccttctctggctttgttccctagatcacatctccatgatccataggccctgcccaatctgacctcacaccgtgggaatgcctccagactgatctagtatgtgtggaacagcaagtgctggctctccctccccttccacagctctgggtgtgggagggggttgtccagcctccagcagcatggggagggccttggtcagcatctaggtgccaacagggcaagggcggggtcctggagaatgaaggctttatagggctcctcagggaggccccccagccccaaactcaccacctggccgtggacacctgtgtcagcatgtgggacctggttctctccatcgccttgtctgtggggtgcactggtgagattggggggataaaggaaggggggcgggttctgactcttatgctgaagccc

SEQ ID NO: 12903 - DNA, 1794 bp, Homo sapiens
cggatcacctaaggtcaggagttcaagaccagcctgaccaacatggagaaaccccgtctctactaaaaatacaaaattagccgggcgtggtggcatatgcctgtaatcccagctacttgggaagccgaggcaggagaatcccttgaacctgggatgcagaggttgcggtgagctgagatcgcgccattgcactcactctagcctgggcaacaagagcaaaactccatctcaataggcagggagaggaaagagatgaagctgctgatgttgatcagggctggatggtggcaggttgcgagtatggaatttggcctttattctgagggtcctggaaaaccattgaatggtttcaagcagggaaggatagggtcagattcatggtctggctatagagtaatccctctacattctttttttttttcttttctttttttttttcccaagatgttgtctcactctatcacccaggctggagtgtagtggcatgatctcggctcactgcaacctctgcctcctgggttcaagggattctcctgcctcagcctgccgagtagctgggattacaggcaccctccaccatgcccggctaatttttgtatttttagtagaggtggggtttcaccatgttggccaggctggtctcgaactcctgacctcaggcagtccacctgcctcggcctcctaaagtgctgggattacaggtgtgagccactgtgcctggccaatccctctacattctaaataaacatttaatcaagatgtatacttgtaatttgctgatcttttaccccaggatactttgacgttgcattaaagcctgaccatttactccaaatcactgtctgagcataggaacctgaagaattgtgtggagagcgtggcctgccgcaggcctgagtccctggtgtttgatcttagacgcacggcccaaggcaccattgccgagcctgcggtgttcagggctgctgctcccacctctgctgcagctctgcctgctctcacctcagagcctctttgcagcagcttaaaattcctcagccactgcaccttcttctgctccatgctctctacaaattgaaattttttatgacaatgttgtatcaattggaaaagttttggaaagtaggattgagaaataaagacttctttgccttttctccctgcaagggaatttgaaaaatatagaaattctaagttacatgttaaatatccttggggtttcctttccttctcttttgaaagtttttttttccattaaccaaatatccgacagaaatgcttgtgggaagataattccttttggctagagcttatactccacattgtgagctttttaattttctttccttggtggtgggttgggacccaactgtgcagttgcgggagctcatcacagtcctgttgctgggcaagttctccctgtgaatctgtgttttccccttgtacctacctaatgaaagccaaattagataaatttttaatcaaggagatgaatgatgagtttttccttagaaaagaaaccacaaggccccacagtactggatacaataaaatgtgaagtttttgtttgcatgtatgctgtttggcatggctttaatgtcagaaaaacaggaggtgttgttaaagtagcatttggaaagacagcattccagacagatagtgtgtttttctccccagtcgttcttctctttcacagttgatgcatgcctgtgtgttcccagcaccttgcactagtacacggtaggtgcttggagatatctgaatgaatgaaaaggagagttttgagcagggtct

SEQ ID NO: 12904 - DNA, 1794 bp, Homo sapiens
tggctcacacctgtaatgctagaactttgggaggccaaggagggcagatcacgaggtcaggagatcgagaccatcctggctaacacggtgaaaccccgtctctactaaaaatacaaaaaaattagccaggcgtggtggcgggcgcctgtagtcccagctattcgggaggctgaggcaggagaatcccttgaacccgggaggcggagcttgcagtgagctgagatcacgccactgcactccagcctgggtaacagagcaagactccgtctcaaaaacaaaaaacaaacaaacaaaaagatatgcgaagtttaaaaaacgaacaacaacaacaaaaagttatgcgaagtttgttttgcttctggataaagccaacatgagtggtctccccaattactactattaagtaaggaggaactatgtttgacaaaaggtgttgtcaagttctgttatttgaagactagtgattgtttatcttgagaacaggtatgtaatggttgttgtggagattttctggattaagagaagttttttttctttaaaattcgaacaagtgtctgtattttttccctttatttaagaaacggtggcggcggtggtggtggtggatggggggcggctctcactaccttgcccaggctggtctcaaactcttgttctcaaatgatgctcctacttcggcctcccaaagtgttaggattacaggtgtgagacacttgtgttggattttttttttttggaggcagggtctcgttctgttgcccaggctggtgcagtggagcaatcacagctgccagcctcaaacttttgggctcaagcgatcctcgcacctcggtcgccccagtagcagggaccacaggcacatgccactactcctggctaattttaacattttttgtagagatggggtctggctatgttgctaaggctggtcttgaactactgggttcaagtgatcctcccttctcgacctcctaaagtgttggattacaggcgtgagcccactgtgcccggcctgcatttaattagacacctaaaatttaggccggtcagtagcacacttagcagcacgttactttttataaaaacaaagaccgaataccgcttttttgaaaaaaaaaaaaaaaaaaaaaaaaaaaggatgcaccagttctccccatatcatttcttctctctacctctcgtcttttgcagctaacattactggccaggtccgcagcagcagagttctgtgggctcccagcctccgccctcctcgccctcctccgcgccggcaggtgaggccgcgtggcgggactacaactcccagcgtgccccgcgacgggagggtcacgtgggcgtccggaaaccctggtcgcaccgccaggggtgagctggcggcgggggaggcgggcagcggagccaagctgacccggcgagcggagccggggctggagagcggcgaccactgcggatctcgggtgcgcaagcggtgatgcgtggggccgaagacctgctggggcgggggcgggtccaatccgaggggcttcccgggtcgggagggcggtggggagatgtaggtggcggccccccttgggtggggcgcccaggcagggtcggccgctcgccccctccttctcctccctgggcccgggcctggggtcccggccgtcacggggaggctgcgatggggtggatggggaggagaaggacccccgggggaccctgcggcccggccccgatccatgcggcagaggcttttgtgctcctcgcccgcctgtcctccggccgtgggtctgggagattctgacttgatca

SEQ ID NO: 12905 - DNA, 1793 bp, Homo sapiens
ctgtgcctgacacaagggacacacgggacatgcagaaccagatcagccaccgctgccgggcggactcaccgtctgcagaccctcaggccctgggagtttctcggcccgacctttgccctccgtcctgttcctgtttgctgcagcagccaggggaggagcagccaccagctcaagccccagggcacgtctgcaccgccgcccaccatctgcagcccaccccggggcaggacgctcctgcctccacagccccgggggtgagtgcccaaacccaggagaatccaagctgtcctcgctgcctcttgctgcgccgtcccctccagggctggccagagggtgacaaccctgccaggccgggagcctgaggccctcaagccactcagcattgctgcctcaagggcctgggagggaaggggtgggccctgggaggtgggtgtgggactccaacttgggtggttctgcctctagtttggactgggccttgggtgactgagggtggcctggcaggagagagctgtctgggggcagaggccaaggtgggcatgttggtaccggccccagcctgagcagacacacctgacagctggcccaggtggcgttctcttctcagcgggcacaaagggcatcccagggcaggcctggcagcaagtccttaccagccaaggtcactcctcaagtcctactcacccaggtgccctgaagtcctgggagcagcgaggggggcataggagccagaggcagtgggggtgggggcgagcaggcgatgcgggtgcctttatcgggtgcagcactgacctaggcacactcttctcatcgccagtcctccacagaaccttctggagtggatgtcagtatctccattttacaaatgagagaaactgaagctctgagaggaagtgacttgcccaggggtcacacatgagagccacacctgggattccaatcagctccccagggctccagagcccttctctacttctgaccctgctgagcatgggcctatagacggtgggagccagactgaagacttgagtcctggaaaggggaagtcagtcaccaggggcatatcaggggcagggtggggcaggggcggagttggccgtgtaccccatgccagggacctcccagtcacttgccccctgcctagggctctgccaaagctggacaggctaagccagaggcaaggcaggggtgccagccctttgcccagggccagagggaggccaggaggaggtgcctgggctggttggcaccttctccctatccacgctctccctccagtcccaagtgacctttcccccagatcccagggtccaggcccgccctcggctggcaggtgtgggcacagaggcagctgggattggtcgcagctggcggaggcgcgtcccaggctccggcagaccgctggaacagctgagcagagcaggtggactgctgagatagaccagggacaccaggcagccacaggcctgtcagaccaggacccttaccctctagacatggcctcggtcccctgcaaaccccagccccgtagccctgcgaggttacagacagcctaaacgccaccaccacagggcctgtgccgtgcccctgacccgggcacagaaggccactggcccggaggccatggagacggtgcccccagcagtggacctggtgctgggtgcttctgcctgctgcctggcctgtgtcttcaccaaccccctggaggtggtgaagacgcggctgcagctgcagggggagctgcaggcccggggcacctacccacggccctaccatggcttcatagcctctgt

SEQ ID NO: 12906 - DNA, 1793 bp, Homo sapiens
ctcaggaacgtaccctgactttggtagacacaggcattggcatgaccaaagctgatctcataaataatttgggaaccattgccaagtctggtactaaagcattcatggaggctcttcaggtattgcagttctgtaggcattcatacttatctgtgttctttggttttttgcttctttaaaacttgtgattgactttaaacttgttggcaggctggtgcagacatctccatgattgggcagtttggtgttggcttttattctgcctacttggtggcagagaaagtggttgtgatcacaaagcacaacgatgatgaacagtatgcttgggagtcttctgctggaggttccttcactgtgcgtgctgaccatggtaagttagcttttctgttacaaggtagttgggttaggattttctgggctcacaccagtagcagaaattttgggcatcctgtctgtaaagcagttcttcacagcagttctgctgatacttactaattgctggtctcaactgcatatactttttaccctgttacacgcttgtaattgactcttctaggtgagcccattggcaggggtaccaaagtgatcctccatcttaaagaagatcagacagagtacctagaagagaggcgggtcaaagaagtagtgaagaagcattctcagttcataggctatcccatcaccctttatgtgagtatggacttttaaatcttttacacttaacgtgcaggatgtttcctgttctggagaatctcattgtccctggcttttgctttccctggtagtgttttgtactccaaggctaacttctgtttttgttacttagttggagaaggaacgagagaaggaaattagtgatgatgaggcagaggaagagaaaggtgagaaagaagaggaagataaagatgatgaagaaaaacccaagatcgaagatgtgggttcagatgaggaggatgacagcggtaaggataagaagaagaaaactaagaagatcaaagagaaatacattgatcaggaagaactaaacaagaccaagcctatttggaccagaaaccctgatgacatcacccaagaggagtatggagaattctacaagagcctcactaatgactgggaagaccacttggcagtcaaggtgtgagaagcctttgcatgttggctcaacatgcacatatggagaggaatgagttaggtggaagagtgttgggtaatagacacacggaacttgtccaactgataacagaaatgtgatagccatgtgatttcacttactgattaccctgtcatagtgaagtgccatcatttctaatgacctcactttctcttcttatggaaatctgggtaatgtctattggcagccttacacatccagggttctgatcagaggggactgttttctacatacagctagtacccatctagatcgtggagggcattaaggctcagttttctcaggagctgcttgttgtgtgtgctctatcccttaggcttagggaggatcattgttccacttttagataatttggtgttggggctaaaaggtcctcttttgaaatgtaccacttatttttggtttctttcagcacttttctgtagaaggtcagttggaattcagggcattgctatttattcctcgtcgggctccctttgacctttttgagaacaagaagaaaaagaacaacatcaaactctatgtccgccgtgtgttcatcatggacagctgtgatgagttgataccagagtatctcagtgagtatctccttggcctaatttagttgggtgaagtcttggga

SEQ ID NO: 12907 - DNA, 1792 bp, Homo sapiens
ggagggggaagaaggcataggaggggagagtgaccagggagacaagcccctcaaggtcagagagggaagccagtgggtccccgagggtggggtcgtgcagtgaaatgtactgtaggaggtgggagcaggtgttgggagcacgtgaaagtcacagccagcctcaggcagcaccactcaagtctatctcagttgcttatctggtccagagaggttgaaaggatgggaaagcttcaagactggattcttcgcatctgctctatgacagagaaggttaggaccagaaagtggcctctgcaaacacagccatttatatgtttggactactgtgtttgctttgattttccagtttcctaaataagaaaggctgctgcttaagagtccagtctgatctcaactaaggggaaaagacatttgtttcatttccattaagggtgggatgtggagagggatcagtccctctttggtgacaccctaaggcaggtcctgggcatccaatcagctcctgagccaagagggtcagtagaactagatgccaggatcccagagcagacaccagaaaccaagggcttctggggcaatcaacccccacctgctgcctgaaaggcttcctttgcccactactttccaggaccagagagagaagcatccctgctgatgagaaagaacagacactcccagaggacaaggtccacctgtcaggcagccacagcccagcatactctggagtctgaggtgggggtcagttgtgaagaaagggaagaaggaagaaaaaggatacgttgtgctccgaccacaggccaaggtacaaagaagaggggaaaagaaaatagctgggccctgagactcatacctgtaatcccagcactttgagaggctgaagcagaaggtttggttgagtccagagtttgagaccagcctgggcaacatagtgaaaccgtgttaaaaaatacaaaaattagctgggtgtggtggcatgcacctgtagtcccagctactcaggaggccaaggtgggaggattgtttgagcacagcaggttgaggctgcagtgaaccatgattgcaccaccgtactccagcctgggagacagggtgagacactgtctcaatcaatcaatcaatcaataaaaatagaagacttaccttgcccactagggaggggctcactagtgagagaaccacagggttctctttcacttactagggaaatggcttccccagagaatggtctttaatttcaaatgagtcctacacaaatatgttttcaggaccccaggattggcagaacccatgcaccctcacaggcaccccaaaagtctcccccggggcctacctacagttgagttgtcagataaaatacaggatgcccagttaaattaaatttcagataaacaagcagtggtattttcatatcagtgtgtctcatgcaatatgtgggacatggtaatgctgtaaaaattatttattgtttatctgaaattcagatttcactggacatcctctatgctttcttgttaaatctggtagccaccagcagttgttgcttttcaagctataagagatggattatggcttaacaggctgccagacaagatgacatcacagatgattggctgggttactgcaagagtttcagcccttcctagacatgtccatacttttgactgccatttataaacatctgattcaactggtttaaccagaagaacagttattgtccctgtaaccaggaatccagagacaaggcgagctccagatgcaatgtgattgatagtgagtgtcacggaggactttc

SEQ ID NO: 12908 - DNA, 1790 bp, Homo sapiens
cccggcgttatgttcattttttgtagagacagggcttcactgtgttgctgaggctgtaagtgggttttgaagtcacacagcaatgtcaagcgtttccgccgcagaagagatttgaaaactactgaaaccttgatgctgtgacatttgtcattttgagatcatttaggctgtttcaaagctgtactcagtgtaaatgcttcatgtgtgtaggcagctagtttggtgttatttgtccatcctaattaaataatttaacaagcattatgaatggatagtcatttgaacatttatgattcttgggttgatttttcatttattttgtttcaaactagttaactgtgtagtaattgtaagtggtttttttaaaaaagtacaagtgaatgtaacttttacctgttacatcatttttaagggaaaagcctgcatgcttctttattttggctgacttgtttaatgcatactaataggtagatgaccctccaaccaataggtggctttctgttgcatgtcatagtgcagttgaaactccttagggtaatcaccctctttaaaggcaaaagacaaatagcatgagtgaagtggtccaaatgccattctttaataacctcagtggtctgatttactttgagcatgctgtgtttcactctgaagtaaaatctgattatagtttggtgtatctggccaagatacaaaagctgaaatatttataacagcagaaccccacaataaaatacgatagaacttcttggcaacagtttattgctcagttaactattttgaagcatttctgataattagcttgtgggtaaattagattttgcaaaaagtttgcaaaatactcttgattcttgaagaggtgaggttattgagaaagagtattttgacccaagatttatgtgaaagcttgaatgtcattttagtaagatggtttccttggctgtctacgtcaagagcttatttagcgtaaaaacattgagttgtactgcgcatcagtttttttcattctgttgaccaataaatactttcaggaccataatcccttcttggcttaggcatctcaggtgtcaaggatgatagaagtcctttgcctgcgtttaataccaattgtagcaagtagaagagtctttatgcttggaatgacacctttgtttgtggctgccatagcctaatgtagtcaatacgaaataattgactttttttcttttttaacaggtgaagagcagaataaagaagcgctgcaggacgtggaagacgaaaatcagtgagacataagccaacaagagaaaccatctctgaccaccccctcctccccatcccaccctttggaaactccccattgtcactgagaaccaccaaatctgacttttacatttggtctcagaatttaggttcctgccctgttggttttttttttttttttttaaacagttttcaaaagttcttaaaggcaagagtgaatttctgtggattttactggtcccagcttttaggttctttaagacactaacaggactacatagaggctttttcagcattactgtgtcgtctccgtgccagatgtggcaagatcaccattagcaaatggaaattacatttgaaagccattagacttataggtgatgcaagcatctaagagagaggttaatcacactatagaggcataagtggtatcagttttcatttttctaattgtttaaactgtgttttataccagtgtttgcaagtaattgggtgttagcttgagatggttaaaggtggtttggggagggacttcgttgtaatggttttgc

SEQ ID NO: 12909 - DNA, 1787 bp, Homo sapiens
cctcccaaaagctgggattacaggtgtgagccaccttgcccagcctagcgacctcttcccaaaagcccctcttgaaacagggacagtcagactccaatgaggcccaaggttaagggatggtaactctgctgcaaacccccggcatttggagctttaattcctgatgtaagtctcagacttcagagccacactgcacatctcacaacagccgctggtccagtgtgctggagttctaatgtgggtgctgtacacagagaccctgctggcaggaagcgaggacactgagctgccatctgttttcattaagccttgctgagtagggaaggtagaaattatctgtgttgggtttgaagcactgcaaacatttgtttctgagtggaagggccagagcagacccaaggactggctaggcagggtctcctgggcaagaaatagtgcccctctggatgtgtgaggcagcgtctggatgtgtggggaaggtgctactggccaacgtatgtcgcctgggaaaatggccactgcccacccagaccctcgggattccacacccagactgtaccccacctcagcctctgcctggtccatgaccggtacccagaaaactagacatcttccagagtgatgtttttgccctaacatccccttcaaggtatcatgaagatgcccaatattccatttcctccatcaaatctaaatccttctgcttggttgctaagggtccccacactcagacccgactgagcggctcccagcccacacaggggacctcctgtgacaccattctaagcctgtgtgtgccccaaatctccagaagccctcactcctgccctctgctgcacctggccacgtctggccttcaccctagtataaagacaccttgcagaggagtcacagatgagctatttagcagtgcctccgtttccttatctattgaatgggggaaataaatgcacccacctcacggggttgctgcgtttaatcagaacgttcgtgctcagcatttcctgggtaatgctgcgctctggaattggccccgcccagccccagcaacagcgagccaggtctgactccagatcacattcacctcttccctcttccctctttgaatctttacacatactgtttgaattgcatgattaccatgaaacattgtccaggtaggtgtctttctccccgtttaggctgcagcgtgcagacctcctacactgtcacccctctgcatttcctcggttccttcgcggcatctggccccacacagccttgggtctggactcagtagttttattttcattaatccactgaaatgctgtcacaaactcctgaacactttctttcatgaggggcttcagggggaagactgaagagaagttatctttctaatacagcgctctgacaggccgacagaaaatctgatcactagagcattggcctgcagacgctcaccaatgtcatatatttaaggaacaaaaaaagaaaaggctttgttaaaatgacctctgagaggcagctgagttttcagtggacgggagaatgccatctgggtgggggctagcttccaccgaaccctgactgtcgctgttccttccaggaaagccctggaagcccatagcgtggctagccctgcctggagtttccacgagcttcaagaatccaggctccccctctgagggcccccaaagctgtggtcaaaggttaatgggctccaagggcagctcccagggttgggaggtatataagaacccgtcagatcagccggacaccagaagacaagcagagagactcctcca

SEQ ID NO: 12910 - DNA, 1787 bp, Homo sapiens
ccttcagccaattcttgacaactggagcttgagaccctccgttgtcttctgttttacttgtcttaaaagccaaatgccccataatgacttttgaggtcttaatgacctgcttctaccatcctctgccattacctgcctcaccttttgctcatgtaaactctattccagccacgttggcactcctttaccattccaggacttgccaggttgcacttccgttctctgcctggtgggtcttcaccaccacccactgggttcacacacatcttttcaggccccatggggccatctttattcaaatgtcaccgccttctggccactttatgtaacagttcatatgtatgtatgcaaattttctatcccccttccctttttctctatagcacttgtgttacttttgcatcttagtctgtctctcccaaaataggggacaagtttcatgagggcaaaaacctgtctgttttgtttattgctatattcctagcatctgtcatgtaataggtgtgcttactgcttgttaggtaaaaaagttcagaaattgccacccagtagtatccatatttgttccctttgtaggtcattaaacagctgatgaaaaaggaattcactctagagttttcacgtgacagaaagtcaatgtcggtttactgtacaccaaataaaccaagcaggacatcaatgagcaagatgtttgtgaaggcaagtatggcagattgcaattgagatgttcttgccagggttaagatcccggtgaaccaataaaacaaaattgtttatctaaatctgtaacatttccagggtgctcctgaaggtgtcattgacaggtgcacccacattcgagttggaagtactaaggttcctatgacctctggagtcaaacagaagatcatgtctgtcattcgagagtggggtagtggcagcgacacactgcgatgcctggccctggccactcatgacaacccactgagaagagaagaaatgcaccttgaggactctgccaactttattaaatatgaggttagctaatgaaaagtttctttgtccacaccctgcacgattcattgtgtttaaacagtactccttcaagcaaaaggtcaaacagttctcacttttgccaagaaagaggtgtggttatttgtttttctgcctgccagctgtgtcacccttaaaatttgctgcttcaaacatacatagttaataatttcataaaagtgttattttcaaagtagaatattttcaaagtagaataatcaagatgagcttaagcttgtaaaccccattttgcctctcatctaaatcatgattttttttaaattggtgacatttctagaatattcattagttactgaaggtcaaaagatccaagttggagattacttccacttttctactcagagtagaattcttttatatcaaggatgtgacatcctaaagctatgaacaaaatgaagaagctttggtactgtgggctcagaatagcacaagagttaaagaatggtttgataacgggtgtagtggtatttttttttctcataagaaaatgcaaaaaccgccaggcacggtggctcaaatgcctgtaatctcagcactttgggaggccgaggctggcagatcacctggggttgggggtttgagaccagcctgaccaacatggagaaaccacatctctactaaaaatacaaaattagccaggtgtggtggcgcatacctgtagtcccagctaccctggaggctgaggcagaagagtctcttgaacctgggaggcggaggtcgcagtgagctgagat

SEQ ID NO: 12911 - DNA, 1786 bp, Homo sapiens
tctcccatataccacattccagggcatcctatgatcacataagaacacaatcctcctgccacaggtaagcgcaatgtaccaggaaacaggttgcgggtaaaccattgttctccctctgccattatgatagaaatatcatgacaggcagctctgcccccaaatcttgcaaaatctcaatgtgcacctcaagtttgtattgttttagcctatgatggaactgacaggttggggaaaatggaaagcaaagttccatcagtctggatcgccttttgtagtgtccccagtgagatcatagctggagaggcaaggatgtaactcactcaaaatttaaggcttatggccaaagttgatgactaataatatagaattgtaggtttgggctttttgctttcttaaaaaactctgtcaggtttggaaagggacctccaatctaattttgagataccacaggtaatgtccaattgtcttaaggtgtgactaaaatttttcttttgtttgttttttgttgttgtttgtttgttttgctgtgttttgagatggagtcttgctctgtcactcaggctggagtgcagtggcacaatctcggctcactgcaacctccacctcctgggttcaagtgactctcctgcctcgcctcccaggtagctgggactataggcatgtgccaccacgccaggctaattttttttttttgtatttttagtagagatggggtttcaccatgctggccaggctggtcttaactcctgacctcaagtgatctgcccacctcggcctcccaaagtgctgggattacagacatgagccaccacgcccagcctaaaatttttcaaaataaacttgctgttacttttcttctttaatttaaaaatacctctataggctacatgagagtttttgaaaaagtagccatgtttggcatggaaataggccccaaatatgtcaacacctgtatttccttccagatttcagtcctataactttggactcccaacagattaagaatcactggtctaaggtttctaaagtcagggtagatccctttcccaagtgacagccacaaatccaacgctgtatcataccctatctaaagaaaagataaaagtaaactggcttggcacagtggctcatgcctgtaatctcagcactttgggaggccaaggcaggcggatcatgcggttaggagttggagaccagcctaaccaacatggtgaaaccccgtctctactaaaaatacaaaaattcgccgggtgtggtggtgcacgcctgtaatcccagctactcaggaagactgaagcaggagaattgcttgaacctgggaggcggagtttgcagtgagctgagattgtgccactgtgctccagcctggatgacagagcaagactctgtctcaaaaaaaaaaaaacaaaaaacaaagataaaagtaaactgaaaacaaggatagaaatgtctgctaacatgctctgtgaccttgatcaacagctttccccgctcttggccttggtgtcctaacttaaatggggaaactgtgatctctctcagctcaaaatttacatgacattatttacataccaaacctgccctacgcttcctggaaactttactacttatgagtgtggctcctccttccctttcaatcccttaattaaatagcttcccctctacaggcttttgaagtggtagcagttcctcctaactcctgccagaaacagctctcctcaacatgagagctgcacccctcctcctggccagggcagcaagccttagccttggcttcttgtttctg

SEQ ID NO: 12912 - DNA, 1785 bp, Homo sapiens
ggctccaagaagtatgaaccagaatatggatattttgtaaaaatggaatgtaagttgaggttcctgaacaatgtgatgttaggcagggtgcggtggaattggcctgtagtcccagctacttgggaggctgagatggggaagatcccttgaggaggatctcttgggttcaggagttcgaatccagccttggcagcagaccccatccctgaaaacaataaaaattaaaacaacaacagtgggatactagtcttttaatttgaaaaaaaaaggggtggagaaagggaaaaccagttttcaaaaaaggccaatttcctagacattagtggttgattactaactcatttcattaaactaaattatgaattggcttttctcgtcagtgtcaccactctgatggcgttcttttccattttccatcttcaccctggccgaatgtgggaaatgatctggtttgtgcataatccgcgaggcccagggaggatcttttgcccctattgttttcttgggtgttctcactctgggggcctgacattcctcgcgtgtctaaggcaatgagggagcagtgaagcgcggggaagccgcacaaaagacatccaaaggctatcaatggaaaaagatcaattaggtgcacacaagaaacacccaatatgccagggaagagaaaaatacccttttccagagggtgggaaattgattgagcttctgtgagggtccacaaagaactggacggatgcagtggtggatggcgatctctctggaccactccggacgcgcccagcagacgcagcctacgcctttaggtcctaggaggctgagaagggtggggagaggggggcagcacgatcttgtgtctttcctccccgtgccgcctctaccgaatcgcggatgcttcattaatcttgcaggcgccgcagctcgggtcagtatggaggcggatcggtggcagagcccgggcctctgggctgcgcccgcccgttcagcctggcccgggaggggagcggccgcgcggtgggccaaagacgcccggccttccctccgtctgcttccagcaggcacagccgggaggctgggctcaggggctgacccgaatctcccctagagctgggcccacccggctgccccccgagcagcctcgccgctcccacgccaccgcccaagtgacaggcccgggaaggccggacgggacgcagtcttcccgccggggtcttccctccggctggccggccgctgcagggcgcgcgcgcacacacgtacacacacacacacacctgcccacacacacacacacacacacacacacacactgccgcctccttcccgccccgcagccctagcagcccccaacccgctccccagcgcgctgcgccccggcggcctccgcaggccccgccccggggaggagagccaggcgcgcgcgggagctaggctcggggaggggccggcggtgggggagtgtctgctgcccccgcccctcgagtgagtgactgagcgaggagctcccctccctcgctcgctcctcgcaagctcccgctcgctccctgcccactcccggggggacgttccgtgccgcggccgccgcggccgctgcttctttcacactttagttgggagctgcgcgccgcgctcagttactggagagctggccgcgcgccgccgcctcccgcacgcttgcacgcgggcccggcttcggggttttgggttcttactccaagcggcggggaggagggggagccccggacacactgtggggaggaggaggaagaagaggaggagggaggaagaaaa

SEQ ID NO: 12913 - DNA, 1785 bp, Homo sapiens
atagttctggagcctgggaagtccaagatcaagggctggctgactcagttcctctgctagatcacactgggcattagggctttatatgtgaattttaagggaacacaattcagtctgttacaggctacaaaggaatttgggagaaaatcctcaacttctcaaaggtcgtctcctcccactcttgaaaaaacatacaatagcttataaaaacctcactttcccttcatgaaggcctggatttaagaaaaaatgaataaaacctcaattccagaatagacgatgggaaaatattgaataatggatttatttgtatttagaagggtagaagagcatactcatgcacttgtgtgtatatatgcacatatataaaatatgtaacatcaaagaatgtgggccaggcgtggtggcttatgcctgtaatcccagcactttgggaggcaaggcaggtggataacctgaggtcaggagtttgagaccagcctggccaacgtggtgaaaccctgtctctactaaaaatacaaaattcaacctggcgtggtggtgggcgcctgtaatcccggttacttgggaggctgaggcaagataatagctttaactggggaggaagaggttgcagtgagcccagatcacgccactgcagtccagcctgggccacagagtgagactctatctcaaaaaaaaagtgtgtgtgtgtgtgtactgaaatgcacctttctaacccatatggttaggacaagactaggactccaggcatgagctgctgcaaatgaggctgagaccatttcctatgagtgggtgtctataggacagtgggtccaggggctccccagacatagtggggactgaataccatggcctgcgtgtggtctgctccaactgggattggtagaaaggaaaaggcggttgtggcgccgaaaaggaagttgttgacaaagaagcaatggggcggctgtagctgtaggagtggagagggtgagaggcgcgggccacggcggcactgggctctgttggtgtcagctggccaacagtgtgggcaccggggcaaggagggaacactggagcggctcagccggcactgagctgagcagtggcagaggccaccgcctggcagatggggaaaggcagagtgggtgagcgggcactgtgtatcaccccctgaggcgtgctgagctcgagcctgtgaccacctgtgctgtggagatggagacaatgtaattgggaagcaggcctggcctccccctgccacagggacaggctggtcttagaggcaccgatggggcagctttcctagtaggagtcatgatgagctacagaggctcacagggtgtcatggagcacgaggaaaggtgcagggaatcctagagaaagtcttgtgtttaaggagcaagacaggaaggagaaaccagtcagtgagatgggtcaaatgtaagtggagaaaggaacgtccaaggagaagcgggctgtcgctatggtgaatcatgcagagatgaaggcgggacgatggagcagtggccccttgggcttggcaggtgatcaaattcgaggtcatgatgaccttcaggagagcactgtgtgcagagtgccagcagtgggaagggaccgggtgggagggaggacgtggaatgtgagggtggtctcccctgcaggaagtttggccttggaggggatgaaaatgaagggcagggaggagtcgcgagcgaacaagcaggagggtgttcgactgctagagctgagctaagcgatgcctaaatcaaaggaacttgtttcttcaagctcttctggcag

SEQ ID NO: 12914 - DNA, 1784 bp, Homo sapiens
gggatcactgtctttcctctgaaatggttttaatcagaaccaatctgttatactcaggagcctaaatcaaacacgacatgcagagagacaaacaagaaagcaacaaatgatctgagccactgaacaagaaatatatataaaacagttttaggaattacagctgtcacaacttttcaccatggggccttctctgtgatttagaaaaaactgcatttatttgttattaggatcggagacaagagaaaaataccgacccaaatagccactggggaagagggaagctctgatgccaatttatgtggaggatggagccaaactgactcacacacacacacacaaaagtatgtactggcattttccacacagtccaggtcacttgggagcttagccaaggatattttgagcattcgactacctattgtgaacaaggttgggaactatgaggcgctatgtggccctgatcaagctcagatgggccaaatcctcaaccaaaattctctttcccataaatgtttatctctacatttcccacagaaggggattctaactcagttttgcttctgaaaccaaactatccaaggccaggtgagatgactcatgcctgtaatcccagcaatttgggaggccaaggagggaggatgcttgaactcaggagttcaagaccagcctgggcaacataacaagaccccatctctacaaaaaatttaaaaattggcgcggtgtggtcgtgtgagcccctagccccagctactcaggaggctgaggcaggagaatcggttgggctgggctgacagtgccagaccctgttaaaaaataaaaattaaaaaaactcctaaatttggaaacacatccccagctgagggccgggagatacttctcaaccgtaatccagaaccctctaaaatgggatgtggagaggctgcagcctgtagtcttgcgatgaccttttagcacctgggcatcttgcgcttctgtcattccgcccacacccgctcagctccatccaagagggcccggcagtttggagtgaaagcttagcttcccaacgggtaaatgaacctgcctcccattcacagggcggcctctggctggacacctggggcctactgcctccttgttacacattaaccaagttctggcctccatcgtaacagcgtcagggaagttttttcctggctgacagccgcagatgatgaccgaagacaacgtcttaactgagacgggccaatttggcaaatggactgctttcctccccagtgcgggcaccttcctcctctgtccggcaactggaccccactgtccccagccctctgtcacccccaaacctgcccaccgcccgcctctacccgaccctccctcagggaaatcgggactcagcccccaacgcccccacctgccgctctgcccacctcagcgcacaccgccagagcgcccagcccgcgcacgtgcttccggcgcgcgccgaagtcctcacgcgccccgccccggcctccccgtgcgcacgcgcgaacgcggggtgggccgggcctcgcgtagcccatctcctcttcctcctcgcggtcgcggccggacggagggtggagggccctgcgcctgcgcggagctggagtccggctgggccgcagccgctgggagaccggcggttgccgtggggaccggtcgggcccctccctcctccggtcccccgccccaggtccttccccaccgagacgcgccggcggaccgcgggcgagtgcagccggtgacccggcgagaggcggcgccgctcccaagatgtcgcagac

SEQ ID NO: 12915 - DNA, 1784 bp, Homo sapiens
gaaatcccttgggagaccattacagtggtattttctccctttagttggctacagagttccctgaatagtgatatctccctgaggagaaaagtgcatggtcttcctgatttctagcaacaaaaggacaaattctacaaatccaagttaggagctcttgcttaatatgctgctacagttacgatttccatgtcaaaatgagatgactcttttatggtcttttcaggtcagagtgatcccaggtgggaccctaaggcgcagaggcctaatctgaggctttccctggtgctctcccaccacctgatgcaagggtattagggtaactgggagtccccttgatcagaaaaccctatgttattaccctaagaatcaaactgtttgcacctcccaacaatccactcctgcttcccaatcatcttcagacatgcaaagttgatgcatagaagctaaaaggcttttgacatttgcaggtcaacagagatttgctaaaaccatctagatttctcttcgcagtccagtcaattcaaccaagcctgcagcatctccgcagctcttctggcttgtgtccttccttgctaggggtcctttcttggggaagggtggacacaacgtgggaacagaaggggaaaagcaggttgaagaaatctggcgtctggtttgttggtgttcccttccaggaaccctgaagagctggtctctattgcatgccatgcttccaggggtgggagtcgggagtcccctcccaccctctgcggccatccctaagctcccttccagagcaacctggcctggcgaccataccactgaaccatcaagggctatggttaatgcccggcgtgttttgaatctctgacttcacgtgctttgatgtgtccccacgaccgtttacttttctatgctgttgccagaggctgcctagcagggcctgtgtctcccgctgacctttaaggccagcactgcattcagatgttgggcttttccaattttgcttaaataacaacaaaatcaaccgaattttttcaaattagagtcccagggagaagaaactacagagaaaaaaatcatattatgtatatatatgtatatacatatgtgcatgtgtgtatgtatatgtatttttacaatttttttatccttgtttaaacctgggcgggaaccaaagagtaaagcgcgtgcggctccctgccccctgccgccaagacgcagtcctgtacagacgcggtcccttccctccgatttcccctgacagctcgcgctactttttcccggccattgttccgtgtccctggtgcttcctcctcccccgtcctccatcctccttgggcgccttgcccgctttgtcccgccagccgcctcagccccgactcgccggggtcagaaagccgccaggatgccctccagcagcccgcgcgccggccgcaggtgcgcgccgccccgccctgcccttcccgcggccccgccccagcgctgacgtcacagtgacgcgcagcccgcgcaggcgcagctacccggcaccccctccccgcggccggcagcccgctcggtattatgattagcgctgggtgcggggtttcggcggccgggagggagttgtcggcgccgcggccgctgcggacggacgctcgcctgccggctgaggtaggggcgagcgcggagcgcggcggggcgcggcggccgtaggcaggggtgcggggccggcctccgccgcctcagtagcctccgctgttgccgggctgggcgcccgggccggggcgctcgccgcaggcggaaagtaagttgcgctctcg

SEQ ID NO: 12916 - DNA, 1783 bp, Homo sapiens
atggctggtaccacctcttacctgttcctgagggcagggtaacctcccatgggaagagctgggtctctctctctctacactttgtctagcacaacaaacaggttgaaccagtaacatctcccagaagagcatgaaaggttgccacgtggcctgagcctgcagaggcattctccgcagggccacacggtggttctgcgcacagttaagttgttcagttttcatctctcaccatcttcccctcctcatcacctccacctggggctgcgtggattctgttcagcgacccagcctcactgtggtggcagaggccagaaacatacccacaccatacagtgtgatgtgtgtgagaagggatggccaggggacagagcaaggtgaaatgtctgtccaaagtgcatgagagcagtctgcagcaaggatggcaggaggcatgacagtaaggtcatcccgctcactgcagtaggtctcctctttaaccatacacacacgcacacaattttctgtatgtttccttagcacccagaagttattcactttcaaaatgatcagtctttttactgaagcttactggctttccaactagtcctaaattgtgaggctttactgaagtacttgagcatgtgaagtgaactgaggaggaaaatggctttgccggcagagtttgagatgcaacgagtacaagccatttgcctatgaagaggctgtttcctccctctctcagggaggacaagtagccagtctgtggtgacatctgttgtctagatgcacagcttttcgatgcctaaaaaagatgctttgggtgcaggggtggaaagacttggttgtgccttagttttcttatcttagtcattcctgttaaccttagaaaaaaggtgaaaaacttactgaaagataagaaacaataagacacaattgtacattattagggatcctatgcttggtagaattttcgcaatgtaaataaattacatctcaagttctgatccttttcagcagaaattctttcctctcccaagtctagtcactgagaagcaaagtgccgttgccttttatttcttcaatgcttctttttggtgcctgaatgcacaccaaggaagagctcctctccagagcttcactgcatcatagacttgtgcaggggccagccagagtgtttctcaaaatcttttaagtctctgaattataaacagagctaaatgggaccttggagatcatcttgtccagccccctcctagagaaggagactgaagctcagagtggttaagtgacttgcccaaggtcaacaggatgctgtgttattattattatgattatttttgcatcaggacttgtgggatctgtagtaactattctcttggccaattataatcacatcactggcattgttttacgagaaatagccccgctaggcccagtcagcaataagtctttggagctgtctcagcctgcagttgctttatataaaccatcccttttatgggagttgaagcactgtatgaaaagggtttttgtctcatgttgaccttgtttagtcacattaacgcacacatcagttccaggccccattccattctctgaacatcttctgacacactgacagtgctgagcagagcaaggttgggttcgctcctctggcagaacctcggctctcaggaggtccttgttccagggaacagctgcttctctggggctgggctctactccctgcagcccctcgcactacccagctggaaccagggacaacgcctgagtccaaccctcgtgtctattttccagaaaacgg

SEQ ID NO: 12917 - DNA, 1782 bp, Homo sapiens
ccaggaagaggaattgagagacaagggtgggagggagtcttgttaactgtgttccatttgtagttttagaattttgtgccacatgaatgctaatcaagcacagctaaataaaatttaaatttaatgtaaacaaaagagaaacaaactaacttccttccactttaccagtttgtagacattaaaatccctttaaaggagggaatcgaatctttaaagaaattaactcctttaccttccgagttcctttctttaaggttttgtcttgttttgttttgttttctgctgtggactgatcagcaaacaagccatttatttctactgcgcacatttacacggagagaacagcctcaacccaccggcttgagaggatttccagggattcagaaatcgccagtgtaactccataaatgctttattttcatggagcgacttccaccctgcagctaaaattgacaaagtgttttcacagccgagttgttggggctgaggcagtgggtctcaggaagatccctggcttaatggatgcaaacgcacaatgaagtcccggcctggagtggaacctttcaactcccagtcattcttccaggaccgggaactcctggcacgagcccgaaagcgttcctcacttgcagcagtctttgggagtctttctgacagcgcgggctcactaacccggcggttccgcagctgtgtttgggagacttgggggcgcattagcctggacagctccctgatcggtaacccctttgatgtgtgttgaatgaatgagcgtcgttagcgtagtagtaaatttatgggagaattaaagcaatccagataggggtcactacggagactttaattacccagggactgtgaagtggggaagagctgtctgtggaggagcgccacaccatgtcttagattcaggcaggccccggattctggtgacccattactctacggtcactgagggtccgggcccccaggactcagaggcaggagacaggaaaagcctgacttagaatcggggaaggacctggagtcgcacatgggggctcccgaaccgcggccccaatactgcactgcgccgcagggaagagccccgggaggggcgcgggtccccgccccgggcgcgcgcagccctgccccgcctcctcccggtgcgccccgcccctcccggcgcgtgccgcccgcgcgcccgaggtgctctggaggaaccggcccggcgggcaccccctgccccggcgcaggcgcgatcgcgggccgcccctcccgccgggcgccctgcacgcgcccccgccccgcctccgcaggctcccccgctccgggcgcctctgattggctctcggccgggccagcaggtgtcggcggtggctgcggccaggctggccctggctgcctgcggcgcgggcgcctccctcgcagccgctgctgccgacgccgctgcgctcccgcctcctgtcggttcccgggttcccgctgcggctgcggttctggcagccgagcccccgcggtgctgcagcccagctttagcgcgcagaccgacccgcgccccttcttcgccgccggcagcctctaatccacgcggcgcgttgcggcaggtgccctgggcgtactgaggcgcggtggcctgagcccggccgccatcgatgaccccggtcgcggacttgcttcaggctggccaccccccgtgagtaccgtccgcctccctcttctcccctctggcagctttgcgccactctcccctcaacgttgccgcaacttcgggggtgggtgtgtgaaggtgtggaggtgtctctc

SEQ ID NO: 12918 - DNA, 1781 bp, Homo sapiens
ccaatggtataatctgcctcagcctcctgagttgctgggattacatgcatgtgccaccacacccggctaattttgtatttttagtagagatggggtttctccttgttggtcaggctggtctcgaacttccgacctcagttaatctgcctgtctcggcctcccaaagtgctgggaatacaggcatgagccaccgcactcggccccaaaactcttcttaaaggtggtcttgcaggtatgttatagttaaaatgaagtaggttgtcttgctttgttcttaagtggctttccagaagtctaactggtctaaaggcagtcttatccccctcactggtgtatagttcaattcagacttgaatgcgaggtatgggtttacatctcatctctgccacttataatcagtgtatccctcaacaattaaattccttagtctccatttccttcctccttcaggggaagttaatattccacaaagttagaagttacaggagaggaaaagtagtaaacgccccaaaatgaggcagttacttctattatatcttcaaaggatacatggctcaaggcagatcaggtagttgggagatttcttaaaaacagcataatagctaacatgaacattttcattattcagagaaatttgacatagctttttaacgtatgtttctgagaaaagttactagttatattgtcttcctccaagaattagtctttgggtacagatgaggcttgaaaaaatgacattccctcttagactaggtagtgtgaagggaaaaaaaaaatgacattcctcttcccccaaagcagagtgaggtccgtatgggatataggtgtaaagaaaattttgggccgggcatggtggctcaagtttgtaatcccagcactttgggaggccgaggtgggtggatcacttgaggtcaggagttcaagactagcctgaccaacatggtgaaaccccatctctactaaaaataaagaaattagccagctatggtggcacatacctgtaatcccagctacttgggaggctgaggcaggagaatctggaagcaggaaggtctcagtaggctgggatcatgccactgcgctccagcctgggcaacacagcaagactctgtctcaaagaaaattttgtggaacacctattttctcactgacatgaaaaatgtttcaaagatgaataatgtccatcaagctatggcaatggaagtgaggatgataaaggattgcacagttgttcacaacctcactgttagtatcctgctgagatagttggtctcctcatcactgtagcatcttttatgtacagcagagggcagaagctccttggcatgtatgtgagggaaccacatatatggaaggctgttattcctgagaaaggaggatgtgcagacactcacagaacaaagcctttgtaaaggaaaggcggccgatgagatggagtgcttccttcacctgtggtgggtctgtatccatgaaatcgcccactcacaatcgctttttgtagctactggaagcactaggcgtctgacctgccatcatccttgttatgatgtcataatcatattctgtccgtgtttattgcagttctctggtttgtctggagtgtttgcaagtcagtcatcatagtggcagcttccgcctgctacaggatatttatatatggaagcataccatggcaggagtgctggaaaggtggtgtcagctaacagttgcttcagccagataaggacggtaacttcagtccaataaaaacctcatcagttaccaactaaatcagggcatgg

SEQ ID NO: 12919 - DNA, 1781 bp, Homo sapiens
tcttgccttgctcttgctactctgctctgggtggtcattgtgaaaagcccgcaccaaccatgccagtggcagccagacgaggacacagcctggctctgggtcccagcaggaaaggcaatcccagaaaggcagggtcagggactggagtcctgtgggtgctttttaagcaaagattatcaccaggcaggctaaacttagcaaccggcttttagctagaagggcagggggctggtgtcaggttatgctgggccagcaaagaggcccgggatccccctcccatgcacctgctgatgggccaaggccaccccaccccacccccttccttacaagtgttcagcaccctcccatcccacactcacaaacctggccctctgccctcctaccagaagaatggatcccctgtgggagggggcaggggacctgttcccaccgtgtgcccaagacctcttttcccactttttccctcttcttgactcaccctgccctcaatatcccccggcgcagccagtgaaagggagtccctggctcctggctcgcctgcacgtcccagggcggggagggacttccgccctcacgtcccgctcttcgccccaggctggatggaatgaaaggcacactgtctctctccctaggcagcacagcccacaggtttccaggagtgcctttgtgggaggcctctgggcccccaccagccatcctgtcctccgcctggggccccagcccggagagagccgctggtgcacacagggccgggattgtctgccctaattatcaggtccaggctacagggctgcaggacatcgtgaccttccgtgcagaaacctccccctccccctcaagccgcctcccgagcctccttcctctccaggcccccagtgcccagtgcccagtgcccagcccaggcctcggtcccagagatgccaggagccaggagatggggagggggaagtgggggctgggaaggaaccacgggcccccgcccgaggcccatgggcccctcctaggcctttgcctgagcagtccggtgtcactaccgcagagcctcgaggagaagttccccaactttcccgcctctcagcctttgaaagaaagaaaggggagggggcaggccgcgtgcagccgcgagcggtgctgggctccggctccaattccccatctcagtcgttcccaaagtcctcctgtttcatccaagcgtgtaagggtccccgtccttgactccctagtgtcctgctgcccacagtccagtcctgggaaccagcaccgatcacctcccatcgggccaatctcagtcccttcccccctacgtcggggcccacacgctcggtgcgtgcccagttgaaccaggcggctgcggaaaaaaaaaagcggggagaaagtagggcccggctactagcggttttacgggcgcacgtagctcaggcctcaagaccttgggctgggactggctgagcctggcgggaggcggggtccgagtcaccgcctgccgccgcgcccccggtttctataaattgagcccgcagcctcccgcttcgctctctgctcctcctgttcgacagtcagccgcatcttcttttgcgtcgccaggtgaagacgggcggagagaaacccgggaggctagggacggcctgaaggcggcaggggcgggcgcaggccggatgtgttcgcgccgctgcggggtgggcccgggcggcctccgcattgcaggggcgggcggaggacgtgatgcggcgcgggctgggcatggaggcctggtgggggaggggaggggaggcgtgtgtgtc

SEQ ID NO: 12920 - DNA, 1781 bp, Homo sapiens
ctgtaatcccagcactttggaaggccaaggcgggcggatctcctgaggtcgggagttccaaaccaccctgaccaacatggagaaaccccgtctctactaaaaatacaaaattagccgggcgtggtggcgcatgcctgtaatcccagctgctcgggaggctgaggcaggagaatcgcttgaactcgggaggtggaggttgcggcgagccgagatagcgccattgcactccagcctgggcaacaagagcgaaactccgtctcaaaaaataataacaaaataagcaatcgtcgcgtcctttctatcctggtcttagcttgcgctctgccataaaactccctctagccgaacccggcccagccctagagcaatccgttacttccggggcgctcagccggcatgcaaacactcttggctacagccccatctccgagtgcgttcggctatttccggaaaccgtcggcatctaggctcaagtccgctaaattctagtgcccgtaggggtcgagatcgttggctgtttccggacgctctgggttgccatggaaactccttcaaccctggctttctccgacttctgctttttgcggcaggccctttccccactctactgccccctgtttgctgagcttgagaacgcctcatttgtcccctggaaccatctatgcttcagtaattcccataagctggcggtcgcctctgggtctaaactcccaaggcctccattgggcactgagcacattcggttatttccagaaacgctccgcggtcttggggatcagcctcagttgtgccagtgcggccgtagagagtgttcggccatttccgaaagcgctcgggcgtctctaagcccagccgagcccagtctcggatccctcgccgacccgattgcactcggctacctctggaaacgctcggctgtctcgggggcaccctctagtccaccagtcccgcgggattacgttcggctacttccggaaacactcgggtgcccccttacctcaggctccgcctcggcctcggttcatccgcccggctcgaatgcgctcgggcatttccgccgggggcgggccaggccgctcggaaccgtggcggcggcggaggcggggatcccgcggctgcggcgacggtggccgcggtggagccacggggcgggcttggcttggtgtgacggcggctgcggcggcggtggcggccgcgaccaggtgagtcctgactggccctcgtggcgggggcggctgggagtgtgcttaaatgcggggcgcccgggggcagtgccgggccccggtggaagccagaacgcaagcgccaggctgcgtcgggccccgcgggaactgggggggccgcaggcaagggggggcctcgggctcggctccgcagcggtgcagcctccttgggacggtcggggcagaatggggagagactccccgcgtccaagataccggactggagccgaggccccaaatgaagggaggccctgcctggaatggggcttcgaatagtaccgaggggcgcccaggcattgtgcggggcagaatggggtgcgggagggccgggggtcgaacccacttccggtcccctagccgggtggccgggtccacgcagacccaagtgcgcgtctgtgtgagcgctcaggccctgccttcacccgcggagcccccagccctgcctgccccgcccctcccgcctcccggattcggggagcgctgctcccggggcgcgcacaccggggcgtgggggcgggctggcaggcagatccaggcggttttctgggcatcccctct

SEQ ID NO: 12921 - DNA, 1777 bp, Homo sapiens
gagactgcacaaggtcacacatccatgaaaccaccctgaccccagcctcataggtgaagccaggcctagtagacatcagctagaaccatagggaggcatgcatagggagataggggagcaggtcattcctgggtagggggatctgggaaactcctcggagaggtctcatttgagctgggcctgaagggtcggttgggatgttggtagaggcagtagtgatggtggaatcagaaaactgaatgggaacacctgggaatgggctgggtgtgataagcaagtggcactatagtctggccagaagtgtgggtggtagaagggggagccctgggagggtgtggacaggttaggctgggcccatggagaccctccagtgccagcttccaggcaggttttattctgcggctggagagctggggactcctggaagctcagagatggtacagggctgggctctgggaagctccctctggaggtggcactcgctgatattccagtagctcagaataactactccagcgctaccttgagacatccaagtgtaaagcataattatttacaggcatgcgccactatgcccagctaattttgtatttttagtagagatggggtttctccatgttggtcaggctggtattgaactcccgacctcaggtgatctgcatgcctcggcctcccaaagtgttgggattacaggcgtgaaccaccgtgcccggccgtaaagtgtaattattgacctcatcctctgtgtgccattatagaggaggaatcagaggtgcagagaggtattatgtaccttgcccgtggtggtaaatggcaaacctgggaccctagagacccaaggtgaatcgtggggtggatgagatgagttgagctatgagaggtgtggccacatcgtggcagtggagaggaagtgacgagcacaagaggcttggaggtaggacaggtagaccttggctgctgatgggctcaagagcgccctccagctgaagacatcctgctgcagctcagcatccgtgttggcaggggcatccctctttgagaagctgcttgccgttctcattggtaaatcctgctagctgttgtctataggtttttggccccaatctgcctctaagtttccccttttcctcatcaccaccttttgggcatgttgtattttttttcttcttgcaactcttggttcttccctgccttccacatttgttgtggctttgtgctgagtacagtggttcaggtatggtcagagcagctggggtagatggaactgacttcagtatatctcagtggatgctcttggctttgggatcttctgcacttttgggatgctcaccatctctggctcccacctacagtgcccctccctatcattgtgtccaccgtaccatgtctccacacatttccaaatacttcctaggatggttgtcaaccactggctcaattctcagattactcctgggataggttctagcctcctccttgtaacaccttttcttttcttgccctccaatgtcagagggtgcagtgcttagcataaagatacggaggcagatgaagtagcctgtgaccctgcctaaccccttcttgggtctggaacctgcattctgtccattctcccagcctagcaggtgacctgctggagctcagtaactcgacaccgccttgctaattgtctgctgaggtcacagtgagctcttgtcaccgcccatccagcaggaccacagtccccgactgggttgactggttcagccactgttctggacactcatgggaaacaagt

SEQ ID NO: 12922 - DNA, 1776 bp, Homo sapiens
gtaatcccagcactttgggagaccaagtcaggtggacctcctgaggttgagagttcaagaccagcgtggctaacatgttgaaactccgtctttaataaaaataaaaaaaaaagtagctgggtgtgatggtgcacgcctgtaatcccagctacttgggaggctgaggcaggagaatcccttgaatccagaaggcggaggttgcagtgagctgagatcgcatcactgcactccatccagcctgggtgacagagcaagactctgtctcaaaataaaataaaataaataaataaagtagtgggtaaaaactggaaccttggagctcctctgcttgggttagatccccaccccagcactttcttcctgtgtgacctccagcctatgacttattcgttgaacttctcatctgtaaaataagaatgctgatagttcctccttagagggtcgctgtgagggttaggagagagaattcatatgtagcacttagaacagcgccttgtgcagtgagcattccggttgtggttgttattattagccagccaaagccgttcagttgtgcttccaaagctggctggaagagtccagcgaccgtgtttaatcattaagctgcattgcctctgtgagctagtgcctcctctgcacgggccaaggagcccgcctttagattgtacggttctgaatgaagcatccaggcgcaagctcagggcaggggacggtgtgggcacaagtccagccctggctctgtcagtgaacaggtggcctgtgcctgaatccgaggtaataggcgagccgcctttgttacctttgagctttctttcaagcccattcagactcctcagaccacgtgtctgatgagtaaggaggccttttctttccctcccccaaagggaatgttggcaaaacagctttctttgggaacgcgcctgttcacgacgaccagccatctcctggggaactccggtggctggctggcgtgttcctgcggctgttgaataagtcgctgttaggagctggcacggcaggttcccgtttccgcattccaggcacccacagcgggctgggggcgggcaccactgaggtcggcctggagagccaaggcaggtggcctcgccctgggaggaccagggacaggaggagtccacctggggctcccctgacagccacctgcccactttgtgatcagagccgtgttcggggagtctttcaggtgagcgatattcattaaatttggcagtgacttgcagagaaagttcatcatgtttcttcctctccggagttagacagttagctttttttgttttctctttttttcccccctcttctccctgaaatgtttacctgtctgctcctaactgtgaagaaagagtgggccgggtgttgacggactgagaaaaatggaggacatttctcccaagagaaggaatcggtgactcttttagtgagttgagctcctgctggatgcagacttctgtgccggggctgggggcgatcccagcctggtgtagatgagctctgtggtctcgcctgagtccgctttcctctctgggcctcagtttcctcttcttgtgaaatgggaactagcagcagtgcccaatgagtcatctatgtaaactgcttcaagcctgggcactgagcggtgctcaagtcccccctccccaaccccaggcccccattttccctgtgtgacctcatctgtgacctctcagctgcttgcttgctgtaccccagctgcactggcctcctgctgttcctccctcggagactttgccctggctgttc

SEQ ID NO: 12923 - DNA, 1773 bp, Homo sapiens
ctcatggaagtggaatcacacagtatctgtccttttgtgtctgtcttattttactcagcatggtggccccaaggttcatccatgttgtagcatgtgccgaaatctgcttccttttttaaggctgagtaatattccagcacatggatggactgcattgtgttcatctatgctttcctcagcagacacctgggtgcttccaccttttggctgttgtgagtaatgctgctatgaatatgtgtgtgcaaatatctgtgtgagtctttgagtaaaatcgctggatcacatggtaattatatttttaattttttgaagaactgccatcctgttttccacagcagctacaccatttcacatccccaccaacactgcatgagggttccagcctccccatatccttgaaacaattactattttctgcatttttctttcttttcttttcttctttttttgagacggagtttcgctcttgctgcccaggctgcagtgcaatggcgcagtctccactcactgcaacctctgcctcctggcttcaagtgattctcctgcctcagcctcctgcatagctgggattacaggcgcacaccaccatgcccggctaatttttgtatttttagtagagacggggtttcaccatgttggctgggctggtctcgaactcctgacctcagacctcaggtgatccaccccccccccccccccccaccccacgggcctcccaaagttctgggattatgggcgtgagccactgcgcccagcctgtgtttttcttttatagtagccatcctaatgggtatgaggtggtacctcattgtggctaaaccatgtacgtttaagaatttacacacacacacacacacacacacacacacacgtgatgaagctgtaagaaaagggagagaataatgacccaaaatgtcagcacaaggatgcctcaggggtagacacaggtgtcttcttagcgccttttagcccacgcatatgtgcttgcgcagtctctcggtgtgttttctaacatttcacaattaaataaggagtagttgatattcacagccaccatttccaccgtatatgtagagaaaaatgctcaaatcctagcgatcagcccgctgagctttcacaaaccgaacacaccgtgcggtcacgaggcggctctcccgaacaccggctctgcacccccagggcccggggaaccaagacttccccaagggcccagcaaaagtgagggaggaggggaggaaaggagggagagggagggaggagtgctggctgctttccgccagcgcctcgtttgggtttcgctctgctgaggcctgaaggcgccctgagggcccctggggggcagggaggggcggtggctgcggccgacagcaaggaacctccggagaagcgaagccgggccagacgtgccaccggggcctcggcgctggcgaaggggcgcgtgcggccgcactggggccagccccgccctggtccccggccacatcctcgagaccaccggggtggaggggggggtctcactgctcagggcccgcgtgacattgcacaggtttagaaacgcacagcgggaaggtggccccggcgggccgagggcgcaggatccctgctccgtccagggtccgtcctgcgaggaggcgccgggggcgggcccggggcggggcgggcggaaggcgcgcgcggggcggggcggggacggcgacgcggcgcaggcggcgggagtgcgagctgggcccgtgtttcggccgccgccatggccgcggtggacctggagaagct

SEQ ID NO: 12924 - DNA, 1772 bp, Homo sapiens
gaataatactctgttgtgggccgggcgtggtggctcacgcctgcaatcctagcactttgggaggctgaggtgagtggctcacttgaggtcaggagtttaaggccagcctgaccaacatggtgaaaccttggccttactaaaaatataaaaatgagcagggagtggtggcaggcgcctgcaatcccagctacttgggaggctgagacaggagaattgcttgaacccaggaagcggaggttgcagtgagccgagatcacgccactgcactccagcctgggtgaaagagtgagactctgtctcaaaaaacaaaacaaaaacaaaagaaacctctattgtgtggctataccacatcttgatccctcctctgtcagtggacacttcagttgcttccacctttgggctatagtgaatagtgctgctgtgaacatgggtgtttaccagctaatacgttttgggtgttgccatgtctttatggcaacgttgaggatgtctttatttatttatttatgtacttatttttgagacggcgtttcgctctgtcacccaggctggagtgctgtggcactatctaggctcactgcaatctccgcctcctgggttcaagagattctcctgcctcagcctcccgagtagccgggattacaggcatgtgccaccacacccggctaatttttgtatttttggtagagatggggtttcaccatgttggccaggctggtctcgaactcctgatttcaggtgatcttcccgcctcagcctcctgaagtgctgggattataggcatgagccaccgcaccgggcctgaggatgtcttaatagggagaaggggaagcattgagctgaatgaggtttggacggtctggaaaagcacatctcgttttccccttgcctcctccttttttcctttcttctctcatttctccaccaccttcccccccgccctaccaagtagggagcttttgctctggtgtaacccattctaagcaccctaaatcctatctgggtaaggggtagtgagaagtctgtggctccattgtgcaggtgggaaaagtggctctaaaggtcatagcaactttcccagagccaccctgcattccaggaacagtcagcactcggcccgggtctgtattcacttccgaagcctctttccatgagaaaattcctggatatacacttctatctgcccagctaccaggggccgggaagagtcctgtggggcagcccttgggcctctcctggaaggaacagtttactttgggaggaggccagggctgggcggggacccccaagcactcagcctagggggaagtgattgtgtttatttatgtggcaggttggcagggcccaggcctgggggatgggggaagttggagaataaaagaaaatgtgaatatctggctggaatggccagggggaggaaagtccctccccagtccctatttataggctttgtgtcctgcaggtgagagacctgccaggagcagagcaggggccaggtcaccccggggtataccgtcccccagcgcaaaactgggttaatgcctcagggagatttccgtaacctaagtccaagggaaagtctggcatgggtgttccctcctctccctccccaccctacagtggcacctgagcctcaggttctctcggccctcccccagggtggtgatcatgaactcgatcctggagcgcatgtgtgccgacgtgctgcagcagacagccacgcagatcaagtttccctccaccggggtggacacaatgccctactggaacct

SEQ ID NO: 12925 - DNA, 1772 bp, Homo sapiens
gctgttctcactggactccttgttcctttttctttcatttgtttgtttttggagatggagtctcgctctgtcacccaggctggagtgcagtggcacgatcttggctcactgcaacctctgcctcctgggttcaagcgattctgctgcctcagcctcctgagtagctgggactataggcgcatgccaccatgcccggctaatttttgtatttttagtagagacagggtttcactatgttggccaggctggtcccaaactcctgaccttgtgatccacccgcctgcacctcccaaagtgctgtgattacaggcgtgagccactgcccggctccttgttcctttgaactgtctcgctcaggacaggacggtagtccttctgcatcctgcaagacttggacaggatttctttccatttaacactgtctcctaaagtgctgctttccttggggaactttgctgttcttgctagtccagaacaagtggcacaactgcccttgacctccacatgaccttctcagggcagcccagactctaaatgtctgtgacctgcaccagcagcagcaaggccatgccggccgtggtccagcccggctgctctcccccactctgcagtgtttttccacacccatgctgcaggtgctggttgcgttcctgctccatccttcagtgcggaagtggcattttgcggttttctgttgtcatgaagcaagtgcgccacacttgcctgtcttatgtgcgtgtgtatatgagcatgcccatctcagtctccctgagcgcctcttttccacccgtctcaggcctctgtgttagctgttccctctctctgaaacaccaaactccctgatctcagcctgtctctccagtctcgacgtaacagcatcttcccagcgaggcctgctctgaccacacggcccgggaaagcagcccaggccccctctcacttcaccctgtgcccattcttgaccctgtgtattgtgtctctcccttgcctggtttgtgtcaggaaggcagaggccctgcctgtcctgctcactgccgcaccccaggcccagcatgctgcctggcatgggcaggcattgacttgatattagctgggcaatgaatgacagtgactgaaaatgtaatagcaagtcagggcctagcacaggaaaataagtgattgctatgtaagtgaagggttgctaagtaggatttgggtcataacatactgttaaggataatttttttgttctctacatgtaaaaatatgtatttttaaaaattggatgtcatgggctgggtgtggtggctcatgcctgtaatcccagcactttgggaggccgaggcgggtggatctcctgaggtcgggagttcgagaccagcctgaccaacatggagaaaccccgtctctactaaaaacacaaaattatccaggcatggtggcacatgactgtaatcccagctactagggaggctgaggcaggagaaacacttgaacctgggaggcggaggttgaggtgagccgagatcgcgccattgcactccagcctgggcaacaagagtgaaactcggtctcaaaaaaaaaaaatttgatgttatggaatgagggagacaaaaaatgctctacaactattaactgatgcttttctggttttgttctccagacaccattcgcttttcacccaagatgatttgatgtcttataaaactctgatgaaccatgatggctacacagacattaagtatagacagctatcaagatgggcaacaggtgagcttgaacttgattctgca

SEQ ID NO: 12926 - DNA, 1766 bp, Homo sapiens
ctgctgatctgggtgtactgctagttttttggcctggatgccccaggcctctctgatcataatccagatgaaaaagaaggcctgtgtcagaagtatttcagttgttttctgctgatttacttctgattcccttaggctgctctgggcagtggctaagtgccctcagtatcagcttgccggctcagcactttcagaagccttcacttgctcaccaatgaggaagttgaatgccaccaggagaaccgccggcctggggcggagctcctcgtgaagtcctgggttgggattacagggcaggctgactttccctatgacaaaaaggcttttgtccccgggaataaatacggaagtttcagaagagcagcctccctggtccgtgtgtagtaaggtgcgcagcctcggctgcttctgggcatagactccacagatttttcacagttgccctggaacacatcatcgcacaaaccggaaggagggcactgtgacccgaaagagaccaagtgtgtttgctgtgcggctgacagcctgactcccgggtcctgttgctctctgtcctgtaaattaagagcagatggagtggataaactgagagcgcaggagaaggtaacacaagtcagaacttccaccaagggcattactgagacatggagaacgttgataattctctggatggcagtgatgtgtcagaaccagcaaaaccagaagccggacttgaagtggctcagtcgatcctgagtaagttctctatgaaatccctatttgggtttacgagtaaattagaatctgtgaatccagaagaggaagatgctgtgctgaaagcattccatagtttagacgtgaatcccacatctcagcaggatgattccagcaatggcttggatccacaggaagcagggtctcgggtttcacctgacctcggaaatgatgagaaaattgcaagcgtggagacagaatcagagggaagtcagagaaaagaagcagggacatctctccttgctcaagagctgcttccactgtctactttgaaagggacaaaagacgatgtcatttgtgttcgtgggaccctggtgcacaccaccagtgattctgactctgatgatggtggccaggagccagaggagggaagcagcaccaatggcccaaagtcccctagtggtgttttatctgagccatctcaggagtccaaagaaaacccaggaggtttcagggaaaatactgtcactggggaaatgaatggtgcagagctctgtgcagaagatcctcaaaggattccacctgagatgagcagcaaactggaagctggcaacggtggtcttcagacagagcgtcgccccagccaggaccaggtgggagaagaagggtcccaagacctacctgcagtaacaaaccagaattcgagtgttggtatcactgagagtgcctcttctaaaaaagaagtctctggagagaagtcattccaacttccagcttttttcagtgggcttcgtgtgctgaagaagggggctaccgctgagggaggagagaccatcacggaaattaaaccaaaggatggggacttagctttgctcaaattgacgcagcctgtgcagaagtccttagtgcaggcagggctgcagacagtgaagagtgagaagaaagcaactgatccgaaggccactcccactctcctggagcagctctctctgctgctcaacattgacatgcccaaaactgaaccgaagggagcagaccctgagtcgcccaggagagaagagatgggctgcaat

SEQ ID NO: 12927 - DNA, 1760 bp, Homo sapiens
aggaatggtactgaaaggcatgaacataacagagattgaatgctttctccaggtggagagactccacagtctggcagggactttttgtcctatttaaaaatatagctaacaccagtttggtgttctctttggatgacaagagggatctgtcgttttaatgtcttctctcgcagccccctcaccgcagccccctcacacctgtgaggcttctttgacgttgagcgtgcacaacccgctgccagtccgcggttcccaagtgcccgcgcagccagcttgcaggggagttgtgcgcggtggctacagcctgttgatcccacttcctcctgctctagtccgggctagggagtggctctgccaggacttccaaggctttttgtctcgggtactggtgttcgcatggctcgagtgtattgttttcttccaggcaatctcggttagcgcttcagcttagacacttcttgtgcgttctgtcgtcttgggctgcgtgtagtctcttgtttctgcgctttctccacgcccttcccagtttcctgttagccgaaggggatcgctctttctgaacgaaaagttctcagagcggagctgaacctcccggaaaatgctcttctcttccgtgtgcgccggatgggggtgggggtgggccagaaactgaacgccgccgtcaggagagctgaggggacccgacggccctggcggaggcgggagaggtacggtcctcggagtggggctgggggtggggaaaccgacgaggggcagcccccgactgtcttggtggcagaggggacttttattcagctggaaccgcgcggcgaggcccaagtgtctctggagagattcggggttcaggaggtggcgggtgcacccaagggtgctgggaggaagctccaggttcccattcttccccagggatcggcgttgcccctgctgtccagaagtgagagggggtgtgcgggcatcgccactacggggtgggctgcagaggtttcctgcctcccccaccctcctgtccatcctagggacccagaccgtaagggagtggaagagatgttgctccaaaccctgtcaccccatcctctctacccgcgctggtcctatccgaggctgggtgcgcaggggtccgaggcgggcgggggtccgttacctctgcgtcccaccgtggccgccgctccggcgggaaccgagcggaggagccgggtggacccctgcctggagggcgcctgccccgggcgacccttacctcgcgggggtagctagggaaacggaagatggcggcggcggccgggcacggggttccgggctccgctcgggcagagcccacccgctgaccaacgccgccgcccccgccgggcggtgctgtgtccccgcaggagtcggagaggatggcaggggccggaggccagcaccaccctccgggcgccgctggaggagcggccgccggagccggcgccgcggtcacctccgccgctgcctcggcggggccgggagaggattcgtctgacagcgaagcggagcaagagggaccccagaaactgatccgcaaagtgtctacctcggggcagatccggaccaaggtagggcggaggaggcgggcctgagggccgcgtggaaagcgggaggtggagagggcgcgggggcgctggaacgcgccgggcgatcccgggaaggcggggaaggcggggaaggcggggaaggcggggaaggcggggaaggcggggaaggcggggaaggcggggaaggcggggatggtgagacggtgaggc

SEQ ID NO: 12928 - DNA, 1749 bp, Homo sapiens
gcacttgcagaattgtgattttctaatttattattctttttccatttattagcaaaagaagttctaaaaattgttttttaatttttatttttttaagacagggtctcactttgttgtccaggctggagtgcagtggtactattttagctcaatgcagccttagattcttggactcaagcaatcctcatgcctcagtctcccaagtagctgggactacaggtatgcaccactacgcctggccaattttttgtatgttttgtagagacagggtcttgtttgttgcccaggctggtctcaaactcctggactcaagcaatccacccatctaagcctccccaagtaatggtattacaggcatgggccactgtgcccggcctcctgtctcttttgatatgacactttcattaatggcataattgttaaatgaaccttggttcatttaactttagcgctcatgttcttccaattattattgttgtatcttcttgaaggaagcccttaaggaataggtaagacttaaatggcactattaaagggtgcatttgttgggatagtgcgtttgttttgatatgaggagtttattcctcatgtgaacataggtctagcagcaggaaggcagaaggcactgtgataccagtctcgggctgtagagtgatgggagagcaagaaaaataggccagagaaatagcacaaggggccttgccatctgtattgagcgatttggtgtttttaatgcttaggggatgggccgtgaggttgatagaaaattgtccttgttggctgggcacggtgggtcacgcctgtaatcccagcactttgggaggccaaggcgggcggatcacgaggtcaggagatcgagaccatcctggctaacacggttgaaaccccgtctctactaaaaatacaaaaaatttagccaggcatggtggcaggcgcctgtagtctcagctactcgggaggctgaggcaggagaatggcgtaaaactgggaggcggagcttgcagtgagctgagatgtcactactgcattccagcctaggcaacagagagagactccatctcaaaaaaaaaaaaaattgtccttgtagagaaagggccctcttgattgcaaattgttcttgttgagagagggccctcttgattgtcattttcattggaatttgcagagaaaaactcagcctaagaagctaatattttctaaataaagtttggagaaaaatcacctgtcaagtgctggttaactaaatttcttaggaccctgtaatccttaagcatgcagtttattcagatgtcaaatatctatgttgaatttgaatcaatgtggtgtgtgtgtgtgtacatatgtatgtgtatatatttttatttatatgtatataagaataatttttttcctttagttggtggtatggattggataatgtacatatatataatttgtgaagtgataaaagtgtatttaaataatttatttctgctgacttactcttggtttttaaaatatcacattatttaattggcctcctgttacattattggctatattgaaatctaaggactaattgtagattagtggtctttatcatatcttggtataaaatttggctgatggttgttttgctatgttttaattactgatttctagggccccgtggttatgaatgtgcttcagtttcataatgcctcctgctatggcagacatccttgacatctgggcggtggattcacagatagcatctgatggctccatacc

SEQ ID NO: 12929 - DNA, 1745 bp, Homo sapiens
cgactgctctagcatccttgtttgtggagtccagactccatcagtacctatacctgtagggctaacgttggggcttcatgaaatcatgcatgtgggtgctcagcagagggcctggtatgcccagcacacaccaagtgctccatgctggtacctgtccttgtgtgccatgttctcccagtggacagatgggacctggaattcatgcctcctctggggctggggctggggctgctacagtgctgtggaaagcctgtcaggatgtacctcgctctgtggctgagtgaagaggccagaggctgcccactgttcaacatctttggaatgctgccgtgtccagggaacttgggtcgcaggtggatagaagcccccaagcccaggccaggccagaccaggcccagaaaggtatcaggtcttgggtagaataagaagcctatgtggtctatctatcctgtggcctttgtcttagccaaagcctcctggatattgacggcatcttttcctgggtttggggtgggcttggagaggttccctctgcacgggactacagaagtgagggagctggaaaaatgcctccagagctggattcctcactgcagctgcttttggaagaaccttcttatccttcccttgagaagcctcactgtctcttctcggcgcttggaatcctgttagtagaaaatcttggggaaaaaataaacccactattcattccagcactgagaaggaggtcagtggggtgcgtcctgtttgtccacaccccccccaccccctctacccctccccccagcaccccaggccagacccagccatgctgacacttgacagcccctgcagtttaccttggctcaggtccagagacttcgggcccagcccccaccttttcaccttgttacccagccccctctccagcgcaaagagcagtttaaatataaatcagtcctcaacacaaacagagctgcagcgagtctcagagccatcaccggaactgagggcccaggttttctgcgagtgcaaacaagcagagactggctccgtaaatctccccaagaacgtcgggaggggtgctggggctcccctccacccccggctcacgttggcccctccagcgcccgcctcgggcaccctcatatcccagccttcctgccccccagccctgccaacctctttctccatcccctccactcacccaccttcgcttcgcccaccctctcttcgccagtccccaggaacctccacccccttgcaacctcctgcccccgcacagccctcacctcccctccccgggcccgccacctccttccctccctctccgcctcccggcaggcgggatcttctcggggcagtcaagcctcgcgggtcgctgcggcgtcacacctgtctgagggggcggcggcggcggcggcggcggggcgggggctcgtagcgcctttgacacccgaggaaaagagggaggagggagagcgcgtttcatcatcggcggcggccacttataaaaacttctaggcgcgcactcgctggctcagtctccgctccgcgaatctcctccggccactgccgccgcggtcgcctctcacccgcccggccgctccagcccgaggcgccccgaccccgcgccactccgcgcccggccagccgcccgcagccatggggctcctgcccaagctcggcgcgtcccagggcagcgacacctctactagccgagccggccgctgtgcccgctcggtcttcggcaacattaaggtgag

SEQ ID NO: 12930 - DNA, 1740 bp, Homo sapiens
tctgagctaatgccttgtgtcaacaggtatattacactaagatggagaatgatatactgaatctgtgtttgcctttaacgtgtgtttaacttcgagaaaaaagccaaggctgggcggtcgcagtcacgctgcatccggcgacagggggcggtgtgtcctgcgaaaagtcaaaacgccggaagctgcccttagtgtttttcagcctcttggtcttagggaaagtgaggccgtgttttacatccaacatattattattctgataatatgtgacttggcgccacgcgcactctgcacttaaacacgcacttaagggataaacacatacgactgaaaaagagtttcgcccttgataggcagtgtatggggtgcgcagctgcaatctgcaaacccttgcagggcgcggggtttcgtacacccgctcaaggacgcaaagaacctccattctctgccatacaaagcactcctggcccagagagcaggaaagagcatcagctaggcccagctaggcggcgccctcggccggactctgaaggtcagggccgctgggcgtccacgccgcctgggtcccagtccccgtcccatcccccggcggcctaggcagcgtttccagccccgagaactttgttctttttgtcccgccccctgcgcccaaccgcctgcgccgccttccggcccgagttctggagactcaacatgaagctaccggccagggttttctttactctggggtcccggctgccctgtggcctcgctcctcggagggtaaggcggccgggggcgcggggagcgaggacagggcgtctcgacgcgcaaagagagaggacagggcgtcacgggggctcggggagcgaggacaaggcatcctggggcgcaaagagagaggacagggcgtcccgggggttcggggagcgaggacagggcatcccgaggcgcagagagagagaggacagggcgtcccggggcctcggggagcgaggacagggtgtcccggggctcaaagagagaggacagggcgttctggagcgctaagagagcacagagcaacccggggagcgagagagaggacaggacgtctcggggcgcaagagaaagggcaggaagtcttggggcacaaagagaggacccggcgtccctggggctcagggagctaggacagggcgttttggggcgcagagagagaggaccaccaggtcccggagcgaagggcaacgccgggagtgagcaccggggcccgggtcgtattccactgtcagatgaagccctgatgtgtgtaggggaatagggaagagacgtgattttcgaagttttcacagttctgcaagtttccaacttgtgtgtaaataggtagaaagaggtagggaaggatacggcgcccgtccaccccttaaggagtgagaggggatcaggccgagcgagcactgacctttgacgtcctttgttgtgaggaaagtccatctatgtgttagttatggaattaaacactaatacaaacaaattatcataaaaatgaaacaaaaacaaaaccccagctgtttatagactccccttcccagatgtatagctgggagaggtccgtctcacactggcttccccctctctctggcccacactcctgtcaccatctccattgcacccatagtggaaatagctaggaagtgaaaacagctaggaagaagaaagagaaacaaaaacaaaaagaagcaataatatccaagacaagccctccccacatctaaatta

SEQ ID NO: 12931 - DNA, 1733 bp, Homo sapiens
agcttctaggcactgaggacagacaaatgactgagacagaacccctgccctcgaggcggtttcagtcttggctttatttgtcttttctgcagacatcatcaccctttttttttttttagaatggagtctcgctcttgttgcccaggctggagtgcaatggtgcgatctcggctcactgcaacctctgttcaagcaattctcctgcctcagcctcctgaatagctgggattacaggcatgcgccaccatgcccggctaattttttaaaattatttttagtagagacggggtttctccatgttggtcaggctcgtctcgaactcccgacctcaggtgatccgcccatctcggcctcccaaagtgctgggattacaggcgtaagccaccgcgcccggcgcccaggcatcatctcttgaaggcagcatggcgatttctggacgaggctcttcataaatgtttgaatgcagtatagtgcaaagagagcaggtttggagccaggagacatgagttctaatctggctatgggatattaggtttccataggtaactattaggtcccacgtgtaactagctatgggacatcaggtttctgtttccttaaaaatgagagagttgattagagattccctaaggcccaggtgcagctcctgcatctctatgggagtaactcagaggtagccatctggttggcagtctacctttcggagttggcggaagaactcagccgttttgtttttgtttttgttttgagatggagtcttgctctgtcaccaggctggagtgcagtggcgtgatctcgactcactacaacctctgcctcccaggttcaagcgattctcctacctcagcctcccgagtagctgggacggcgcgcgccaccaagcccagctaatttttgtatttttagtagagacggggtttcaccatgttggctaggatggtctcgatctcttgacctcgtggtccgcccacctcggccttccaaagtgctgggattacaggcgtgagccaccccacctggccgaactcagccgtaaggcctcttcctgttttaatctcctgggatctcctgcttgaaaggtagcaagccaagagaaagtatggtctttacagtcactgggtgtccagagggaggtgatatctgctaaattggttctcgaggtgggatttccccagtcccgactgggcatcttagacttaatggggttgcttcctagggctaacctggccagctgacctaacaaacagcctggcctgcccctctccggcctctaggtaggccctgtggacagataggaggggcagtgccttcagagagacgatacagatgggaagtcaactagcttgcttaggcattaatttctcgggaggtaagagatgtgagggggtgtcagtttccaccatcccttctctatggcccccacaaagggcaagggccagacacgtgggctggcgtggggaggtggaggagcaaatgatgggggcggggcctcatttgcatggacggcgcgcggccaccaatccggacaggcggatcgacagcccgcgcgccttttgggggcggactgacagccccggggccctatggaaggcgggtcctgcggccggctggggcgggacggcgccgggcgctgccccggggattcgggccggctcgcgggcgctgccagtctcgggcggcggtgtccggcgcgcgggcggcctgctgggcgggctgaagggttagcggagcac

SEQ ID NO: 12932 - DNA, 1724 bp, Homo sapiens
ccccttaagagacagggttcactttcatcccatatacttctgattaaaaggagcctcttatacccaggagaatacattccaggtgcagaaagccaattacctagttattcccttacccacgtaattatagaccttaatccaaattcaaaggactcctgggagatgctggaatctgtaattgtgtaatctctttgatgaagcacagagtgtgatcttttgctcatgtggggctaggtttctgtggagaagctggaaatgctgtggaaaagggcttgccccttttgtgtatatgaactctaatgtagttgaaattcctagaagtcaaagatataaatctaactactaaaattcatttagtgcattaaaatgccagttattaatttacggcaacaactaaagggaagctttgtattattctaggactacaatgcaatttatgctttgcataatcattcagtaaatgacttattgctccagaaataccatcttgctagatcccattctgaattcagtgtttctgagcaatctcatctccaatacagagtgatgacatactcaggattccaagacggcaaaatgacttgggtaatgtagtctagggcctgccagtgagtatgctgagacagaccagaaagacttaaagattccactaatgtagacaaagcaagctgagccacaacttctcggaacaccaacaggatgcaccaacaatcgacaaaaaaaaaaaaaaaaaaggagataaagtttaaagtttgtcttccagcattcccttaccctattttccccttcctcttccctactttatcagtgggaaaagttctcaataatgcaattcttactgagattcttgtgtttatcagagaaatgtttcctctttctttgccaaggaattatatattcccaacagacatggcgcttgaatgctatatttcctttggaatcaagaaaggggaggtgggggaatcaaaaattaaaaaccaaacccaagccattgttcctcttcgaggaagggtgggtggtcagtcgtcgcctgagctccgaacatcaacccgcggctctcaagttcccctcccagtaatgctgggcccagcctcgccgcggccgatccagcctctgccctaggtggaagcgggccacccggtcccttcacccactgaggcccagtcctttcgcctcaacacgaaggcacctggccgggccggagcagcagccgcggggccggcactggggccacggaaccccgggccagactcaggcctgggccagctcggctccggcctgcagggggcgctgcggcggcaccggcgcgaggcccgcgcgtgcggggagcgaccccaggtgtaagtcccggggcgtggggcgcgtgggtcaaggcggagcgacccaggatccccgcgcccgcggcggccgccgagtggcagcgctggactcgcggagaagcttgggtacctgagccgcggtcccgggtgacaccctcagtgacgccaggcgcgttccttcctcttcctctctcctctccggccccgccttcccttccctccgcccacctccctgaagcggagccgccgtcgccaccagcgccgtcatgtcggcccccgccgggtcctctcacccggccgccagcgcccggatcccgcccaagttcggcggagcggccgtctcaggagccgcagcgcccgcgggcccgggtgcgggcccggcgccgcaccagcagaacggtgagg

SEQ ID NO: 12933 - DNA, 1710 bp, Homo sapiens
tcccagaaagacctctgagtgagcacaggggccctagaagaagtttccttgtgtccttcccgttttagggtctgtgacctgaacccctgggcttctgcctcaggcctcctgtgctctgctctctgcctgctgggtcccctcaccaggcttctgtctggttcccaggctacctgcctggagggtcacaccaggaggatttcaaacaggtttcaagtggggtcacttgccatcactgtgccccacgaggtacactgttgtgggcggcagggctggcctttctcatctgggacatgccacgttgctgttcccaaggggagtggtgagtgggtctgtcctggtgtgcctggcctggggactgccagtgtccttacttggacactcaatgaaaaggccacatgaatccctggggcgtccagagcatgggtgaccagcacgggctcaccacatgaggccaaggggctgcaccatacagcctctcctttggccacccgtgactacccccaactccgggccatggggcttccctacccctgggtgtcctctaagccagctgggagacaacagcctgagtccgtgtctgcttctgtattttgtgtggttttagaggatccctgggctgcctggggaagcacccagggccagggagtgtgaccctgcaggctccacacaggactgccagaggcacacacctgctctgtctacccgagggcaccagagggcacgagaaggctggctccctggcgctgacacgtcaggcaactgaggcacaaggctggcatttctgaaccttgcccctctgcaaacacaagggggcgatggtggcactccaagcaaaggggcgtgtgggtgctgcaggaggagcacagagcactggcgcccctcccctcccgccctgcagatgccggaggccccgcctctgctgttggcagctgtgttgctgggcctggtgctgctggtggtgctgctgctgcttctgaggcactggggctggggcctgtgccttatcggctggaacgagttcatcctgcagcccatccacaacctgctcatgggtgacaccaaggagcagcgcatcctgaaccacgtgctgcagcatgcggagcccgggaacgcacagagcgtgctggaggccattgacacctactgcgagcagaaggagtgggccatgaacgtgggcgacaagaaaggtggggtccgggccagcaggtgctcagctctgggacagggacccaggaccaggcatcaaagcccttacaggagaagctgttatcaccccatttccagggggctgggaaccctgggatatgcccagatagggctggggggctcctctggagtcccagggtgccagggtccctgatgacccctgcaggccctgctgcctgctgccccaggacaacaggcccccacactcacagggtctgacggtggtgcagttccccttgaactctgttctggccaccatgggacctgcctggggaccagtcagacaggttctcctgggcccgcctcccgcttgaacttcagcctggggcacaggatgtgttaccgggctcacggagtgactcagggaactagtgccgccccagggccccaaggtgggcggttcggtgattcagagagggcagctctgtgttaggacacactggggccagccaggaagggtggaaaagatagggaccagcgtgagcatagaggctaagggaccat

SEQ ID NO: 12934 - DNA, 1691 bp, Homo sapiens
ctcagcttctcaggactctggacattcaggtggcgctgaccggcctggaggtgtggaccgagcgggaccgcagccgcgtcacgcaggacgccaacgccacgctctgggccttcctgcagtggcgccgggggctgtgggcgcagcggccccacgactccgcgcagctgctcacgtgggtgcctctgacccggacgcgggtcccgggtggggcggcctcacctcccggccccgcctggtcacgccgcgctccgcccccaggggccgcgccttccagggcgccacagtgggcctggcgcccgtcgagggcatgtgccgcgccgagagctcgggaggcgtgagcacggtgagccccgcgggcgggggcgagggagagacaggaggctctacggccgcagtgaccgccctcccacggccccccaggaccactcggagctccccatcggcgccgcagccaccatggcccatgagatcggccacagcctcggcctcagccacgaccccgacggctgctgcgtggaggctgcggccgagtccggaggctgcgtcatggctgcggccaccgggtacgcgggtggggggtcggggctgcggcggggcggctagtcctggggacttcctccgctgcgtttctttggtcgtccctcagtttcctcttctgtaaaatggggataatgatcatagtgtccgcttcagggtggtttatgaggcttaaagggaagaagctcaggcaaagtggattctcaacggtatgaagattattttccgagtaacctggcgaggttactcctacaccgggaggagcaccgtcgggtcgcgattccaccttgggtcccgggctgctcactattggggccgcatcgtcccctgtcccgcttgttgtgtgactttgcgcgggttacttcccctctctgggctctgcgcgtctggcggctgtagccaagcccaggggtggggatcagagaagcgcgggggttgggggactgtccctccatgcccaatgccctccccgtgccggtaggcacccgtttccgcgcgtgttcagcgcctgcagccgccgccagctgcgcgccttcttccgcaaggggggcggcgcttgcctctccaatgccccggaccccggactcccggtgccgccggcgctctgcgggaacggcttcgtggaagcgggcgaggagtgtgactgcggccctggccaggttaagtcggctcgcccggcccccacttgccctctccgctcaggtctggggcgctgcgccctcacctgggcccttcttgcctttctggtcccaggagtgccgcgacctctgctgctttgctcacaactgctcgctgcgcccgggggcccagtgcgcccacggggactgctgcgtgcgctgcctggtgagggcatggaaggttcagggtgagggtttcggggagcttgggagccggcctgttggccttagttaattggtgccctcaggttcccccgttgggtgctgggcttgggtaggcctggctcccccagctccgagccgcgctctcggcatggacctctcactgcacgtggcctctctctgccttccccaccacccgtcacctgcgcagctgaagccggctggagcgctgtgccgccaggccatgggtgactgtgacctccctgagttttgcacgggcacctcctcccactgtcccccagacgtttacctact

SEQ ID NO: 12935 - DNA, 1688 bp, Homo sapiens
ctgagcttcagcacagtagaccaaaccaaaacagagttactcaaggtgaatttctacccaaccacgcctaaacgaaattgtttatctgaccttctgagaaatcatcaaatccccaaactggtcagttttaccccacataaggaagtccattctgcttaaacctttacaagaaaagtaattttgaaatgactaatctgctttttgttctctgtttctactttttaaaaaaaagtttagacagggtctccctctctgtcactcatactggagtgcactggcacgatcgtatctcactgcaacctccaactgctgggctcaggtgatcctcccacctcagtttcctgagtagctagaactacaggtgtgcagccacagccactatgcttggctaatttttttttctttctctcttttaaattaaagttagttttattcaaactattttattcagagcccagctaatttttgtatttttaatagggtcgggattttgctatgttggccaggctggtcttgaactcctggcctcaagtgatctgccccctcctcagactcccaaagggctggaattacaggtgtgagccaccacgcccggctgcccaactaattttttaaaaaatatttttattctttagagacaggggtctcgctatattccccaggctggtctggaactcctggcctccaaggatccttccacctctgcctcccaaagtgttgggattacacgcatgaaacactgcttatggcctgtttccgcctctgtctcctgggtaatggggaccacaggtgcgcaccgccacgccaggctaaagaaataaagtgatgtactgtatgaagaagtgccgtaaagtgatattaaatgtaaggtattgtcattattaacgttattattattattcctaatatgagatagactaaaggccataaatcaattggtattaacgctagaataagaaccataaattggccgggcgcggtggctcacgtctgtaatcccagcactttgggaggccgaggtgggcagatcacgaggtcaggagatcaagaccatcctggctaacacggtgaaaccgtgtctctactaaaaatacagaaaattagccgggcgtggtggcgggcgcctgtggtcccagctactcgggaggctgaggcaggagaatggcgtgaacccgggaggcggagcttgcagtcagcccagatcgcgccactgcactctagcctgggcgacagagcgactccgcctcaaaaaaaaaaaaaaagaaccataaatcaaacgagtctataaaggagttccacaggtattccaatgtttggctacattattatcagtgtatattattattgttactgtatttttagtgtactaagtgaaaaacctggacttggagcaactgcaagtcccattattttgaatgccctcacagtggggttggggcggaggtgggggaggaaataaaaaaaacaaaaccaaaacaaacaaacaaacaaaaaccaaaaaacaaaccacgagacccggatgtaggcaaaaactacatttcccagaatacctcaccccctctccactatatatacagtccatccgggttctttgagatgctgtttggcgactcgtcgccattcccggagcaggtcggcctcggcccaggggcgagtatccgttgctgtgtcggagacactagtccccg

SEQ ID NO: 12936 - DNA, 1686 bp, Homo sapiens
aggagtgagacagaaaaccagcagggccccggggaccgagccctggagaagcgccagttcccgcccagatgagggccgacacctcggaaggaccggcctggggggtcgccctccccaggccctctgcctcccatcgtggcatggactgcacctttggtgtccttccctcccatggcctctgagtccctgaacactggctcatacctgctccacccagatacagcacagaggagagacccgggcagcctctaagggcagtgccttgagggccagtgcctggtgcacctgccgcacagggcacaggacacaaagggctgggtgatccattcaggctctctcagggcccgcgtcgagctcggcctgggtcccaggaaggctgccaggcaccaggtgctgcctgagtccgaaggaggccctgactccaggtcgcccacggcaggagtgggccccacggagcttctgtggacccttgacccgccaccctcaggtggaagccatcaggctgcgctggataagccagcctctccccacctctgccattcaagtcggtgccagtgctgactggagagatcccagagataactgtgaaatgcctgtcactgttctcagcttcgtttatgtaggctgcagagccaagacagcaaatactgcacatccgggagcctccccaaggccggccctgggccttcccccaggaagagccccacggccagctccttcctgttcccctggcggcccctcgcttcttccttctggatgggggcccagggggcccaggagagtataaaggcgatgtggagggtgcccggcacaaccagacgcccagtcacaggcgaggtaaggtgcttggctccatgggtggggcccggcaaggtcacactggcccttgctttggagtcaggaggcctctcttcttcccacagagccctgggatgcaccggccagaggccatgctgctgctgctcacgcttgccctcctggggggccccacctgggcagggagtaagtcagtggggtctgccctcaatctcccctgcctccctccaggagagccagggactcacccggcccttgtcccagactaactctggtcacagaaccatcctgtctgcctggaggggtggggtcccctgttctggcagaggtcacccccatatcaccgcatggggattttcttccctttgggtctctcttttcttcagagatgtatggccctggaggaggcaagtatttcagcaccactgaagactacgaccatgaaatcacagggctgcgggtgtctgtaggtcttctcctggtgaaaaggtgagtagggctatggtcatgggcccagcgccatgtcccctcccatcccacagtttcaggaactcagggcagggggtaagcacccgtggccacttttgccacacatgcctggctactgtcgatgcttcctggctcccgctgatgcttcctggctggagcggagacggtcagaccgtcctccctaccttctcccttcaacccaagctcaactcaaccaaaaatggcccctctgtccccatgcctgataggaaagtcaggggaaagtctgtccgattactgtcaaagaagacaggaggtaagggtcagagtggaccactgactgaatatgagtcgcagaagtgttagaggcagaagtccagggccatttccttaatatcgaag

SEQ ID NO: 12937 - DNA, 1678 bp, Homo sapiens
gagacttccgaccctccactcggcagcccctggatggcgcagctccacctccccgcccccaactcctgcctcgggtcctctaggcaggcgcgccgggtcctgcgacaggttgggactgagctgcatggtgctgcgtcccagtgccctgaggctacgcccagaggcggctcagccaatcacagtgcgggcaggcggtggggacagagccgcctgggtggcatcctggtgggggactttagaggtcaaactggcaaccttgaggcggccgcagaggactgaagacccctggaccctgcacttgccgactgtgcctgtacagacgggacgggggccaccccggtgcccggcgagtacctccgctctgtgagtgggggcatttctggggtgctgagctatggtattcctagggctggttgggcaggacagggaagctcgacccctgcaagtcaggtggagatgtcccttgctccttgcaccaccgcacatgccccgtggccacagtgagcctgagcagagggtgggggcaagcagcatgggacctggcctgggagctcagccaggagccctggttttggagaggcagatgaggtgttggcagtactggcgacatgtagggctgcgggagcagtgtgtgctctccttcccactgtctcctgggaaggcattccagaaaggtttcctgcaagaaggggagactggaaaacatagctcacctcctgctgtgtactagccaaaaacaaggtgtgaagtgacctcccaattattggggatccctttgtccctacttgggattagaagtctccattggtgaggttttgcctggatggcctcagtacaatttgtacaaaacctagatcagttagtttcctagctgttgccttaaccttctcacacacgaggtaccttcatatttttcataacctaaattatcatcgcataaactgtttcagctcctacagctctggacaggctgcttttcattttggtgagtccatccaatacctccacttgccctgttttcctccaaccagatccttggcctctttcaccgtccttaggtaaatgcatgggaaaataatttaaatatttttattctactatggtggccaaagtttctcaggtagcagtaagatggctttttaggattggtctaatcagatcctcatttcttttcccttcctaggttttgaaacatgaatccttcactcctccttgctgtcttttgcctgagattagcctcagctagtctaacacttgatcacagtttagatcagtggaaggcaaagcacaagagattatatggcatggttggtggcacctgaaaccatccagagggattcctgggagaatggtccttggtgtttggagattatagccaaagagtagctactagaggccagctcttaccaataacctaatgcaataacctaatggcaccaattatgagtacgatgtgggcataggctcctgttgtttcttgacttggagaacatctcccagaggcgtcaagccttctctggccatggtttctttttcacttttgtctgcagattcactcggtgagcatgggttgggttttagttagaaataaagagcatcaattacatatttgcctctagaatgaagaaggatggaggagagcagtgtggcagaacatgaagatgattgagcagcacaa

SEQ ID NO: 12938 - DNA, 1671 bp, Homo sapiens
ctgtggaactacacagcccagtgctgttcccacgtccccgctgtggaactacacagcacagtgccctgccacataccagagaaggagtgccctctgaactcctccagacacccctgaaaaatggcctcttctcccctaaataccagagggggcagtttggccccaccaagtagaaatttaagagacctggttccaatttggctgtgccactgcttgcctggtgacccctctgagcctggaacccccacctgtggagacaggggtctgggtgggctcatggctcattctatctcttggctccccctggcaccagtgcggacctgccccctggacgagttccagtgcaacaacaccttgtgcaagccgctggcctggaagtgcgatggcgaggatgactgtggggacaactcagatgagaaccccgaggagtgtggtgagatttggggcggggctcccaggcttcccagtggccagcaaccacccccactcccaagactaattctggctctgtgtccccctggctgctgcagcccggttcgtgtgccctcccaaccggcccttccgttgcaagaatgaccgcgtctgtctgtggatcgggcgccaatgcgatggcacggacaactgtggggatgggactgatgaagaggactgtggtgagcagggggccgacgagaggcctgcaggggacgggtagtgcacagtggggtgagtctggtcctcgtgggagctgcactggggttagggttaaccaggaggactcgcccaggaaggggaggatccattgctaggagcctgggggcttttcgttaggaaagagaagcccctggggaaggctctgggggctgcctgatgccttaggtcttggaggtggggctgggaacccaaatgtttgacctgctccccctgcaagccttgtcacttaggaattgggagccactgttatctatggggttgccgtgggaggaggaggcaggggagaatacccagggcctaaagcctctgccctcctcagagccccccacagcccacaccacccactgcaaagacaagaaggagtttctgtgccggaaccagcgctgcctctcctcctccctgcgctgcaacatgttcgatgactgcggggacggctctgacgaggaggactgcagcatcggtgaggcccggcagcggaccggacgctggtggggagtggggagagccaagccctggcctggggtggctcaagggagggcatccactctctgtcccccacagaccccaagctgaccagctgcgccaccaatgccagcatctgtggggacgaggcacgctgcgtgcgcaccgagaaagcggcctactgtgcctgccgctcgggcttccacaccgtgcccggccagcccggatgccaaggtaggaaagcggggcagagcaggggtggacaccccaactgtggactctcatgaccctccctgtaacccttagacatcaacgagtgcctgcgcttcggcacctgctcccagctctgcaacaacaccaagggcggccacctctgcagctgcgctcggaacttcatgaagacgcacaacacctgcaaggccgaaggtgccggagccaccagagggcagaaaggctgggtggggcagggcgaccaggatatcaaacggggccgacttggaatggaatgtcttcctg

SEQ ID NO: 12939 - DNA, 1659 bp, Homo sapiens
ttagtagatacggggtttcaccgtgttagccagcatggtctcaatctcctgacctcgtgatccgcccacctcggcctcccaaagtgctgggattacaggcgtgagccaccgcgcccagcctcaagcaattttcttgcctcagccttctgagtagctgggattacacgtgcgtgccactacactcggctaatttttgtatttttcgtaaagatggtgtttcaccatgttgggcaggctggtcttgaacccctgacctcaggtgatccacctgccttggcctcccaaagggctgggattacaggtgtgagccaccacgcccagcctgactcagtcttgaagagctctctggctgctgtctggagaagggagtgtcgggggccaggctggaagcggggaggcagagaagatggtgatttgagccaggtgggggtagttttctaaatggaaagaagggaacatattcgagttttttttcagggagagtcaacaagataggtcagtggactggggtgcgagggaaggagaggaatcaagggtggttcctcaaggtttgaggagtttggtagatggtggagccattttccgagacgagaagatcgggggagggaggttgagagcagatggagtgtgggccttaactctggtcctaaaatcaagcgaggacaactcaacaacaagagtcagacaaccccattaaaacacggaccaagcacctgcaaagaagacatgcaggcagccaggcgcggtggctcacgcctgtaatcccagcactttgggaggccaaggtgggcggatcacaaggtcaggagttcgaggccagcctggccaagatggcgaaaccccgtctctactaaaaatacaaaaattagccgggtgtggtggcaggcgcctgtatgtaatcccagctactcaggaggctgaggcaggagaatcgtttgaacctgggaggtagaggttgcagtgagccaagactgtactccagcctgggcaacagagcaagactctgtcttaaaaaaaaaaaaaatgcagatagccaacggggacatggaagtgtgctcagcgacactcgctcatcgttagggaaatgagaatcagtgagacacactcatacccattaggatggtcacttgagaaaacagaaaatctcaaatattggtgaggatgcggagaaatcggggcccatgtgtgccgttggggtgagggtgcggagaaatcggggcccatgtgtgccgttggggtgagggtgcggagaaatcggggcccatgtgtgccgttggggtgagggtgcggagaaatcggggcccatgtgtgccgttggggtgagggtgcggagaaatcggggcccatgtgtgccgttggggtgagggtgcggagaaatcggggcccatgtgtgccgttggggtgagggtgcggagaaatcggggcccatgtgtgccgttggggtgagggtgcggagaaatcggggcccatgtgtgccgttggggtgagggtgcggagaaatcggggcccatgtgtgccgttggggtgagggtgcggagaaatcggggcccatgtgtgccgttgggaatgtaggatggtgcagctgctgtgtggaggcccccccaaaatttaacatagaattaccatatggtggggcaaccccacttctgggtatcaaag

SEQ ID NO: 12940 - DNA, 1653 bp, Homo sapiens
attcttccaaactgagcctctccacaccccctccacccttccccccaacagatatgtctattaaatcagtgtctgttctccccctcgcacaacaaagagaacttctcaccgcatgaaattgccgctgaatggacaccagaaagcaggatttgcataattccttccaacgaaaccctgtcgggaaggagggaatgaggggcccaagcgaacggatagactctcctagattctgccgggaaagacctggttcccaagaatattcccctgggggagaaggggctggaattctgggcctccccgaggactgggcgtgggggacagcggacgacgagagggcatctccccacacaccagcagcaccgaagcaaagacggggaagtaacaatgctggaggacaggagagtcagacacaaggatggactggggctagggggcggcgggcggagcggagacaccacacgggccacttactttttggaggggggttaaatatatgagttaagcccttatggtcccgccggccgccgcacagagggaaacgggaccttgggagagaaaaacagacaaaacacacagtgtgagaggcgcagctcggccgcccggcccctcccggggcgcccccgtccgcgctccctccggcccgcagggaaaaagccacccgagggcggcccaaggtccgggaggcggggggcggacggggcattcgggcgaggctgcggctccggccaatccccgggaggggacgagagcgacccccgccggggctcctcggtcggacccggtcccaccccctcctcccgcagcacgacaccgaacacaaatacgcacacaccgacccgtgcgtcgaggattaactccccggccaccgccgcccgctgaggaagtgcagccgctgccccccgcggccatgacaccccacttggctcggtcaggcgcacccggggactgtgacagctccagctccctccgcccccatctccacctcacgcttcgcacacgcccgagcgccgggcgcccgcctgcagcccgccgcgcgtgcacgcagacccgggggcgcgccccgcgcgtgggggaggggtggcgcaggaggaggacggcggcggccacagcgcgggtgggggccgagcacgcccgcgcccctcgcgcctcccccagtacagcggcagcgccgcgaggcgagtcgccacaataagccggcggcggcgccggggcgccgggcctggagcgggagcaggggcgggagcggggagggaggggagcgagcaggcggggatggagagcgggagggggaggaacccgcgctcccgccgagagccagccccggggaggcgcgcggaggggaggggccggcgcgcgctcggccgagcaggggagcccgcctggaggtcgcgcgcgctcacactccggggggtgggggaaggggggacgctcgagccaaagagggcgggcgggccggagcagcaattgccacttccccagcttcctccctggtctggggcgaccggcggcggggcggccggaggggcggcggcggtcggcggagggtctcacctacacagtgaatgagcttgtggcgccacgaatccagttcttgccgaaagccgcgtctctcaacggagcattgctgccgcctacacaccctcgccatcttct

SEQ ID NO: 12941 - DNA, 1652 bp, Homo sapiens
gaatggaggaccttctatcctggcctcacagatgccatctgaggtccttttctcccagcctgaatggggaagctccctctggcagggttcttacatagtccctgagtttctcagccacatctcaggatcctaagctgagaccctggccctgggtcctgtgtcacatcctcttatgtggcctcttggctgggacagacctcatatgactggcgtactagaaaggaccctgctcacattattacagggccgtcttcctggatgtgactgtgccctaaagcagtcagcgtaatggagtgattcaacccgagggccagactgacccaggcatctcaacctcaacactattgatattttgggtctgataattctttgctgtggggacagtcctgcaccttataggatgtttagcagcatacctggtgtttagctatcagtagtgcccccaagttgtgacaaccaaaatgttcctagacattgtcaaacgtcccctggagagcaaagcagcctctagctgaggacctctgaacttgtctatggggacagaagttggaagagtggttacaccaggggtgtggagtcaggtaattgactgggaaaaggtacaaggacctttatggaatgctgggaatgtcctgggtggtgtttacacaggtcgtgcatacccatgcgtgacatcaagctggacacgtgatctatacattttactgtatgaaaaatgtacctaaaaaatgcaccttagcgtcagacagaaccagacttggatttcagtcctgattctgcccttaaggttcattttcctcatgtgtaaatgggggcaatagtaggaccctcctcctgtggctgctgtgaaggttaaatgagatgatgagtgtaaagtaacttcacccagttcctgcctatggtgagggctcggagaatattcgctatgataatggacagggccacttcctctttccatgcctgagtttccacagctgtgtctgatggtccctaagatcccttaaggtctctgtcactgtgactttttctgatggcctcggagctatttctttctcagtctaaatactttcaaggcaggtgattctatcgaaccaagcaaagtttgtcatcagagttgctggggcccctggagtagatgaagtgctaagaaggatccaggacatcccagtcagaagttttaggtatagaaaaaaggaaggtcgagggctacggtgaccttgcaaagcacagagccactctgcacccaccactttcctcgcagaagctcctggcaggcctccgcatctcaggtcccgttctaatactgggtggggctcagagcctgcacagtgaactccttaagtggaggtgaaacagaattcacttgtcaaaagggcagtctcaggcagaatgctgtcccctctgaatcattctttttgttaaggattaaaaaaaaagccacccccaaaaggcacaacccaccctggagagatcagagataactaagcttgtgggaaacagaagtgtagttggcaccaagtcagagggtggggaagggaggagagaagataaccagcccctatggaggtgtataaaaggtgtccactctggggaagagccacagtcctcggcccaggccaagcaagcttctatctgcacctgctctcaatcct

SEQ ID NO: 12942 - DNA, 1635 bp, Homo sapiens
ctctctcacctctgtcttgagccttgtgagattttgacccctcaccttacccctgccttattgggcatccccatgtcacctcctccacctccagaaaatgacaccatctactgggtggacatgggcctgagcacgatcagccgggccaagcgggaccagacgtggcgtgaagacgtggtgaccaatggcattggccgtgtggagggcattgcagtggactggatcgcaggtgagcagtgggcaggtttgtggggcttggggtgtggcagaggactgggggacgaagtgagaggaggagttggcgggagcaggaagaggagctgtaggggtgcctgggagcttggagacaccaggtccacctgtcctcacctaacctccctgagccccaccaactccctccttaggcaacatctactggacagaccagggctttgatgtcatcgaggtcgcccggctcaatggctccttccgctacgtggtgatctcccagggtctagacaagccccgggccatcaccgtccacccggagaaagggtgaggagctggaaagactggccttgtcattctgcccatggcccatgctgatgaggccctgtctcctccagggtctgaggactgacccccacttccacccccaccctacaggtacttgttctggactgagtggggtcagtatccgcgtattgagcggtctcggctagatggcacggagcgtgtggtgctggtcaacgtcagcatcagctggcccaacggcatctcagtggactaccaggttcgcacgccaacttggccttggatccgatggtagacccctgacccaggctcctgttccctgtgatgagcccattctgggaggacttggagcccaggggaagtcacagggtctcccagcccagccctccacccagagtaggactcctgctaccacagagatgatgggcaggggtcgctcagaagtggggagtgggggagtggagagatgcctggaggtcaccttatcagcagggcagtgggcaggagtgtatgcaggaggcaggagtgagttaggggaggctgaactgagggcctcactctggcccaggcactccctgctgccccagacatggggctggcagcgagctcagccctggaggtgaggtgggtgcctctggcctgtaggatgggaagctgtactggtgcgatgcacggacagacaagattgaacggatcgacctggagacaggtgagaaccgcgaggtggttctgtccagcaacaacatggacatgttttcagtgtctgtgtttgaggatttcatctactggagtgacaggtgagggcttctgtcctggcctcctcagctgatctcttccttccctcctgcctccactgatgccctgcttgtgccctgtccttccctcaggactcatgccaacggctctatcaagcgcgggagcaaagacaatgccacagactccgtgcccctgcgaaccggcatcggcgtccagcttaaagacatcaaagtcttcaaccgggaccggcagaaaggtgaggctggggctctgggctggggtggagaggtgagggggactctggcctgggagagtgctccccagggaacccagtgtgagagggctgggagacaagttagacccatg

SEQ ID NO: 12943 - DNA, 1614 bp, Homo sapiens
agaacgtaaaagggggaacagtccctcctctccagcgtcaatttttggcagccgacgtcgtctgccccgctccttgaactctgacatgcagacacctagaaagtcagacactaaggtaacagccataaaacgccgcccagaagggggcagtgaccaaaagcacgttcactggcccctgggaaccgcctggcgcctgccttctgcaaagtatcattcccgtgtgggctgagcctggggacaaaggtccggcgctcagcagacacctccttggaacccgaggcctggaaacgaaggtccagagtccctcatcttattccaaatcctggcgctcggaatctaaaaccctaacttgatggcaagccagtcagaaggtattaaaaaaaaaaaaaaaaaaaaaaacagaaaaataaatgagccccgacttcttgggcgaaagggggtggcctttcctcaaccccacccgctggtgactcacctccctccaaaccagggcctgcccctcccgcgcctagggctgggcgagcagggcgggcgggtactaaggtgggctccatccccgagccccacgcgggcggacaagctccggcgtgtcccctcgggtgtccctgtttactccgagcccgggagcgaggtgggggcgggtcctcgcggtccctccccaaccccgccccctccttcgcaggccccaatcccagtccggtcttccaaagtctccaaatcaaagctcagcctttccctgcaccttccccgcggactggcggtccctgtccccaccccgggcagaggaggcaccttcagggttcccctagaaaatcgagcctcggcccagaccactgagtcccggacgcccccggagggagcctgaaatcctagagtatgacactgagtttcaaaggggagccgctcagctctccgcccactgcccaatcccaccctcgaccccttctgctctctggagcaccagggaggagggcccagccaggggagagggcgccccaggccccaaactagccagcgagtccccgggaccctcactcttggaccgctttccagaactccgaaccctgtcgcgggtccgcgtcgccctcccccgggcagcgcgtcaaatcggcgcatgcgcactcactggattgccgcgtagctctttctccccccacccaccaaccttttttctttccccgccccttccctccctccctcctcaacccgtcccctccctctcccccatcagcccccccctcggcacttcagtccggggaacagcggtgcgagctccaggcccatgcactgaggaggcggaaacaaggggagcccccagagctccatcaagccccctccaaaggctcccctacccggtccacgccccccaccccccctccccgcctcctcccaattgtgcatttttgcagccggaggcggctccgagatggggctgtgagcttcgcccggggagggggaaagagcagcgaggagtgaagcgggggggtggggtgaagggtttggatttcggggcagggggcgcacccccgtcagcaggccctccccaaggggctcggaactctacctcttcacccacgcccctggtgcgctttgccgaaggaaagaataagaaca

SEQ ID NO: 12944 - DNA, 1592 bp, Homo sapiens
aatctactctttcagccattgcgaaatatacattatgaactatagtcaccatgctgtgcgatatttctaaaacttactcctgaaactttttaccctttgaccaacatctccccattccccatctaccccccaacacccccacaactgtctttcaaagacaaaagaatttcacctctactaatgaagcatttatgtagaaagacactggtaatgtttagtttccttcatccaacctgctgcatcttgtaagttcctggcaagcagagttactttaggtcattcatatttataacctctccttgcctgcggtggttattatagcaaccacacctatggattatcacctaactggagtttcctcctcacaggccccacccttcaatgttcagagaggggcgattgccccagattttatttaattgtcagagtttaggagggagcaattcactcttccctacttccactccatcttctcaatcctacatttccatcacttttaattttattctgccttgcctctttttttatattttacatcttatttttgaaattgtcattaccatgccttgttttaagagtacacaagctcattatagtaaagagttttgggtgataacattttctgaaataagggtgaagaaatatcctcccatgtcacaaccgttgggagggcgggggtagggatgttggaaggcacggtccctgcggctttcaaggacaagacaattaagtgttccggtgcttttctgaggcagaacattgagcatctatttatggtgactgtgacagtggaggtgattggtaaattcaccgcaggccaataaccttgccagcagccatgaggagtggcaaagaattctgcagaagagcaagtcctaagcacacaaaacagctcggaaagtgaaagcgtcgctgaagtgcggaagcctcgcatttcctgggtcctcttcttccttcctttgccgtctcctgccctcccgttctcccccttcctctgtggctcaggcaggacagaccccaactcccagcttccctggcctccgcgggttcggagactgggacccccgggccaggagtgctggggggcgcggtcggccagccccggcttccttcatggagcggcggagctccacctcctcctccgcactgcacttctcacatcctcagcatcgcgtccacgaggccgcccgccccgcctcagaaccgtaacctccaggagctgggttgaggaaggcgcggaggacaggaaccccagcgccggcagctaagcctccagacggagcccgcccctccggccggttcctgcctccaattggcccgcgagcccgtccgtctccaccgtgggccacgccttccgggccccgcggctggccggctcctcgcgccctcccctctctcggccgctcttcgggccgcctctgcgtgtggggccgcccgcgccagtgtgagcctgagctgacggcggctccgggaggctcgcagaaggggagggccgggcggcgcgggagctgagcatcgccagggcgggcggcagggcgcggcctctccgccgggtgtaccacctgtcgcggcgcgagacctctggtaaggcc

SEQ ID NO: 12945 - DNA, 1587 bp, Homo sapiens
ggcaagtcttctagtccccaaatttgccttgggaggatgacagctgtatctttcttggttctggtgtacagtggagaacagggtcaagatgagtgtggaatccatttatttttttacgtgtttataagcactagaaagcagtgagcactaagcagaggacccctcttgcggaaaaagtgcaggagagctcctgggtgcctctgtatcaccggtttgccttctagccagaatcattgctagaaccctgtcactcagttactttggttcctaatttaacctcttcccaagccttctattgcgttcagttagctaggccaggagcttacagctgtctggttggtgctggctcaatgtgcttattccctggaagatagaaggatcacttacaaaaaaatttacaattaaaataaaaaaattattttttgctgaagcattgtaaggtttttttaattcactcagacccaaaatcgtaaaactaaaatatttcaagacattacttgattcaccccccacttctctttctcccctgtttctcagcactttgcaccagatacagaaaccacgggttatgtccaaaccctggttttggtgtgaccaccgccttccgtgtactgcctgcggctcgcttcgggcccacacgggacaccgaggcatgatgaggacgcagaacagcagaagcgcgccctgcttcccgggcgccagtgctcggggccagcggcgtgtacccggcgggcccggccgggagcgggctggcgatcgcggggctcggcgctcccggctcccgcgccatctcccggcgcccgccaacttcgctccgcccgcggcgtagagaagctcgcagccctccggagcctcagcgatctcctggctcgcttttcccgcagccgccgagcagcgcaggcccggcgactccgggtgcagctggccctgtgcggtgacatcgccgtccggcgccaggctcgaagccgcctggccgcgcccgcggggtcgcaggccgctggtcccgcccggccgcgctcacaaactactcgcggctcgtgacccgggacaaacttctggcggcggcgcagcctcttccacagtcaccctccccagagccagctaccaaaatagaagacgcggccggggcgaggaggtgggcggggggagcccggtggccgctcctccccgcgcggctgacgcccgcttcggcggcggtagtggctgtggccgcggggccgcccccagccgagctcccggaggcgctcgggcgcgggccggcggggcacgggcgctcacgccctctagcgggccgcggcggcgccgggcggccgtgacgtgagcgctcccttcagccggcctgcggggcaccgccagtcagtcggggagcaagagccccgcgcgcagccggcgcgggctcggtcatcggcgcgccgccgcccggggctgggcttggggctgcctgtggagaggcggcgggcggaacgcgcgcggccacggccacggccaccgccacggccacggccggcagctcgggtcccgggtcccgggcaggggaaggggagaggcggcgagctcagcaaccggaaccgagggaagattttggct

SEQ ID NO: 12946 - DNA, 1577 bp, Homo sapiens
ctgagctttggagagaagagcactccagcagggaggactaccagagcaaagtccgggcggcccaccagagcaaaggccgggagggccaaaggtccgtgcgccttaaagtgtgggaaagtagtgaagatggggagacaggaaggcaggggccagatttacctttgcaggctagagtagagttttgatttttttttttttttttttttggagaccgagtctcgctctgtcgcccaggttggagtgcagtggcacaatctcggctcactgcaacctccgcctacccggttcaagcgattctactgcctccgcctcccgagtagctgggacgacaggtgcgtgccaccacgcccagctaattttttgtatttttagtacagacttggttccaccatgttggccaggatggtctcgatttcttgaccttgtgatccgcccacctcggccatccaaatgctggtattacaggtgtgagccatcacacccggccaagtttttattttattccaagtgtgatagagagagacatgatctgacttatatgttttgaaagatggctctgggactgttatgtggctactgggctgtccggaggggaaactgagacccgtttggaggagagggaagttggtggcctggatagagtggtggcagcagttctggagaaagtggatggatctgggttatgtggtgagtcagagtggccaggaacaaatgacaggcagatgaattagggtgacccttagatttctggctgcatgcaacactcgggtagttactggggaaccgagcagacgctcagacacttccgagccttgagaaatccgttctcccgccaggcttcggtgtgagttaaagtcgggcagccggaaagcgacaggctcagacccgcagccggtggcctcgtagcgccgggacgccgggacgcctggataccgggagagcgctgggactctccgagcccggcgcgggggtttccgcatcttacgggcggggccggaagaggaagtcgcgctgctgtggcggccgctgtagcagcggcggtccagtcgtagcccggccgcccgcgcctgtccggtccggtccggccacggaggcagcgcagcggcgggactccgagcctaccccgccgagtgagctgcgccgcaccgtgccgtcccacccggcacccaccagtccgatggggccgcagcggcggctgtcccctgccggggccgccctactctggggcttcctgctccagctggtaagggggcgggaaggcgcgcaggcctcccaggggctgggcggggccggggccaaggccggggctcccttcccctactcctcgcccggcctcccctctgcccgcacctccgcggcctgctctcgcactcctctttcctcccctcctctttccattactcatctctttccttccaccctcctcttttccaccctctttcccccaactttcccgccccccactcggttcccgcccattgaagtctggcgaaatacctaccgcaaaaagatcagaggagccccttaggttgcgttgaccttgatgcttctcgatagttgctcactgtcccagcata

SEQ ID NO: 12947 - DNA, 1567 bp, Homo sapiens
ggaggatgacctagcactgaaaagccccggccggcctccccagggtccccgaggacgaagttgaccctgaccgggccgtctcccagttctgaggcccgggtcccactggaactcgcgtctgagccgccgtcccggacccccggtgcccgccggtccgcagaccctgcaccgggcttggactcgcagccgggactgacgtgtagaacaatcgtttctgttggaagaagggtttttcccttccttttggggtttttgttgccttttttttttcttttttctttgtaaaattttggagaagggaagtcggaacacaaggaaggaccgctcacccgcggactcagggctggcggcgggactccaggaccctgggtccagcatggaggtggtggacccgcagcagctgggcatgttcacggagggcgagctgatgtcggtgggtatggacacgttcatccaccgcatcgactccaccgaggtcatctaccagccgcgccgcaagcgggccaagctcatcggcaagtacctgatgggggacctgctgggggaaggctcttacggcaaggtgaaggaggtgctggactcggagacgctgtgcaggagggccgtcaagatcctcaagaagaagaagttgcgaaggatccccaacggggaggccaacgtgaagaagtaagtatggcttgctggggtcggggccgggccgggccagtcacggtgctgatggttctgtcttccttccttctctcctccctccctcccttacttcctcttaacaccctgagctggacccgtctggcgcctgtgtcctccgtgccagggagagcgtggttgggggcctgcgttacggactttcactcaggcaaggccagttgtcgcagcggggcgtgcgtttgcatgggctcttggactccagttaaaatgccctggtagcgaaaccctcctgagaagggagcggcccccaatcccctaagactagccccttggctcccccagctgtccaaggagcagaggcgcccagtggaatcagcctgtgtttgtttgggccccgagagtttgtgtgcggccgccaacacgttttctgcgcagtgtgtggccgttaccggggccaggcgaaatgtgatttgtttatcctgtcagaggggaaccctgggctgccaaaaataactgtttgcaccggcttatcagtcagcaggagggaaacgtagcctttcctcatttgccagggatgtgacgctggaagcatccctggcccccggggctggaagccctgcccgagggggactgtgcctccctcccgaattgcatccggaagaccttacttttccaactgacttcttcaggcacggggctgccgctgggcatcccggacgcctctgcatctgtgcgcggagaagctcctacctagggcagcactggccggcctgagcctctcccagctggtgggggtggccgggggtgtccctgccttatcgcagccagacacgctgcacctgccgccgcctggcgggccctgcccaggccctgctcctttcccagccttcttaactttcaaaactttgcctcctgtttc

SEQ ID NO: 12948 - DNA, 1544 bp, Homo sapiens
gctgcaggtgagaacagacagtaggggcagggatgggagcagggagatcaggcaggagaggatggaggctgggccagggcgtgggcagcggaggaagaagagtttagaatggagcgattgattttatacgtggagcccacagtttgtgacggattggatgtggtgtgaaggaaaagagagggtcagaaaagactctgaagttctgggcctgccattcatcaaaatggagaagtcaggtgggcttcttttgcaggaggaggggaagggttgatggagagggttgggaagggagttttttcaaaagaggcggggacagcgtaccctggagagcgctggggagccacagccccggagctgtgaggtgggactcgcatttctgtgtggttgggccaggagtccaggacaccacctgactctgacctcttgcagacggggcgggggaggggggacgcaggttatggcgtcagagcaggatcgaatccaactctgccgcctacctaccaggtgaccccaacaagtcacttcccatcttagaggccgggcttctccttccgtaaaaggactgattttgcccgttcctgcgctgtccccgggaaaagcccttaccaccgagttagtgggactcccagcactggggtgatgagcgcaaggtctcagcacagataagagccagggaggctggattctgacttggtacttggcctggctgaccaaaactgggaagtccctagaaacggaggcaccggacctcctgggaccaggaacccgggctcagagactgggagagggaaggaggaggcggccaaccggccccaccccttcccgccagcttcaggccccctcccccatacatacacctcggtttcccagcatctccagtcctcccccaccttcgccccggctctcaggttcctccctgggaggtccaggagcttctggccaggggcatagtagttgctagggacccttttctaggtactaggggagggggctccccaacctgcgggcaggcagctgcctccacgatgtttggttttaataaagtctctttgtttccttctctgtctctctgcccctctgctttcccttctctgtccagtccctctctccccggcttctccctccttctaggcctctgcggcccctccccgccttccctcccgggctgggggcggcgccgtgacgcggcggggcgggggaaggaagggggtgtcgctgacgccgcggcggcctccggcggctccggccttttgtgcgggcggttgggtcgggtgggggcggcggccgcggaaggccaggccggtgccctgcggggacgcccagcgcagcccagccccgcgcagcccagccctgccctgccctgccctgccctgcgcccggggcgcgcccaccgcgccgcatccatgttcgagtaaggaccgggcgactagagctcagggaccgggcgcgcgggggaggccaccggagggagggggcgccgcgggcttggggagggggcggagcggccgctgcagaggtcgggggcctctgcacatggctctggc

SEQ ID NO: 12949 - DNA, 1500 bp, Homo sapiens
tcagtctgctttggccagcccggaccccttgctcttgcaggaacccgagtcacctgaacctgagcagttgctccggtcaaaagggaagtaaacgtcaactaccggcgcctgcaatgtcctttcccatgcctgtttgcctatcctacccaccccagccgcattttgtcccgctctggaaactcccagcagtcggttctcatcacagcatctttccttctgcagtggttgctgaacttaagtatgcacccttctccaaggccgacacacttttcgaatcaggtcagcggtgtcactggtgcaaagtcctaaaactaaaacagaatgagggtgtttcccccaaagattccacctcgtagacccagcactcaccccaatagagaagacggtcgagctggccgggaggacgcggacgcccgactctgcctccctttggctttaccaactgcccaatgaccgctgcggcggggctgtttcgtaagcggctggccaatagcggagagaggggcgggcctcggtgggggcctggcccagtgagagtcgcgcgggggacgatccgatctctgtccagctgcgacccaatgggagtccccgccaggagacacaaccggcggctctccggggatttataaggtcccgccagcaaccgcgcgttgggattcgtggtgttgctggagacccgtatggtgtctgcagtcagcgaccctccaacttcaactactggatcaaccatggtgaaggatgctgtgcgggggagggtgtcgcacgatggggaggatgccgggggcgcacggggggtcggtgggaagggcccgcagcgcaaaacggaagggcgccccggcagtccagggtgtggggtgggctgcgcggggatgccaggggtgtttgggcgttcagggcgaaggtgggctctgcagaaagcccggggacgcccgaggagtcccggcaccacttttctaccctgcttcccctacgggaggcggtgcgagctagaaacgttctgagcgccccagaagcgctgagggactagggaggctggcgagcggtaaagcgtgggcgagaacatggtggggtcgtttgtgcgctgcgctcaaggtcgggcagcggagtcggctctgcggcagagcgcgctctggagcctggaggggatctagggcccgccccgtatttctcccgctgcggtcctggacaaagaggtgcccgcttgtagctgcggtccccgcctccctctgagatcacattgccgcgcaggaggcaaggtccaggatgattgggaagctctaacaggtttctccagttcaaaacctgttcccctgaatgtctttgtcttgggcgcccgactctggccagaggtagaggtcctcgccctttggccccatacttgactagggattcctgtaagctcttggggccttgaaaagaatgttcttgactccacttttctcctgtttggtgcccaaggacttgaggtccctctgttaaaactgagaacttgactggcca

SEQ ID NO: 12950 - DNA, 1500 bp, Homo sapiens
gcaaagcaacaacaatagcaacaaaaagttgactgggcgcggtggcctgtgatcccaacacttcgggaggctgaggcgggcagatcacttgaggtcacgagttcgagaccagcctgaccatcatggtgaaaccccgactctactaaaaatacaaaaattagccgggcgtggtggcgcatgcctgtaatcccagctactcgggatgaggcacgagaatcccttgaaccctggaggcggaggctgcagtgagctgagatcgcgccactgcactccagcccgggcgacagagcgaggctccgtcttttaaaaaaataaaagaataagtaaataagtttaaaaggtcttttacttcagtccagttggtaactaaaaaataataatacattttttttacatccttcttccataatattgtgtagcctcttacatctacggaatcaaaagggatccttcccaaggttcattctagcaaaggaaaacgtttctttccaccatacaccctgcgacacgtgtcttaatccactcctgctcaactggctcccagtggatccctagggatttttttttttggagccaacgtgggtcagaaaaaggaagagggtgggtcagccacaggttttcagcggactgggctggcggtcgcaaattccccttacttccccacgtaggtaaaagctaacgctgcggcgaggcagccgcggtcggggcgtctccgctgaaggcgcccgggcctcctgcacgttggctgcccgggtgcgggggtgcgggctgcggtaggcgcggaggtgcagcggtaggacctccgcgcacaggcccgcctgggcggacacagcccgagttggacacgggagcagccgggcagcgcgtcttgacggaccggcgagcacttgggccggttcacatccgtatcccacttcaaggagacgtcttcgctgcatcctccggttccgggtggaggctgaccctgggccattccgtctccggtctctggtatttctgctgggtcacttcatcccgggggcctctgaggaggcggaactactgtgtcaggagtcgtggttttcaaggagaagtcgtggtcggattgacagaggtaggggaagtaggcggaacttccggctggctcttccatcagctgccttccccgggcgtctccccgcaacctcctcaacttccctagtcagtgacgcggcgccggccagaaatccgaccggaccgggctcgggggagcgtgagttgcaggtgtgtgcctatctttgcgtctctgtttgagaggacaaactgtggggctgggaccgcgaggtgactgtgactgaggaagagtggtaagtgacagcgagggcagtgggagccaggggctgggaggctactgtgaccgagggccagtgacagcgaggggactgtgacccaggagcagtgaatgcgaaacacggtgacctcggagagcgcgaggccggggctgcgacggcacttggaccgaggaagtatgaggcagtgact

SEQ ID NO: 12951 - DNA, 1500 bp, Homo sapiens
acactcagcacacagtagatgcccgaagtgctggctgcttttggccaaacaatcaaaggcaagggacggccttcctgcagccttggagacagacagcctggctccagatcctgctcacgccccgtactgacccggtggcttgggtgggtcccttaacctctctgtgacatggacatgatggtcgcagcagctctggagagcagtgagatgacaggggtggccacacttcacataactgctggtcccgggcatgtactcagtggtagcatcacttgttattctccttccctaaatgtccgtaaacgtcccttgctggctgggtggaaccgttcccaaggaaagagtgtacaggcattcccaagtccccaggagctggagtcttggggactgaccaagcacctaagggtgcagtggcttctcaagcaacatcctggggctgccccagagaggccctgggcgggggagggcagtgcccagatttatccaccaatcgcacaggctgctggcactgagcacgttcttatctgcccagcccagcatgggggggtggccaggccggccggggcgggacgctgcctggggctggacgcggaggagccccaagccctgctgggtgggtgacagccgctgaggctctgagtgaccctgcaggctggtggccagccggccgcccatcttccacaccatgtcggacggcgagggcccctccgccggtgagtggcagcgctatatttacccgctgtggctccggttgcagagccaaggccgccagtcgccgagggcactggggcccccgcaggctgcaggcagctgtgagctggacccccttcctccttgcccgacgcctggggggcctgtgccgctggaaggggggagcttgactttcaaagctgggttccgccacaccccctgactgcccagtgtagccagtgcaggaagctgtgcctgattcaagctctcctggggctggcagccggggccagagctgacccaggacagaggggcaggggctgcgacgggacccatgggtgggctcaggatgccgtgggccactggaaccgcatgcagacgagtgtgtgtgaacacttaacggcgggggagagcacacagcttccgtctgattccccaagtctgagacctctgggcgttctgagtccctggtccggcagcaccaggcaggccctctgtgtgccctcatatcctctaggttgaaaatggccagcgacacaggcaggcagaagggcgatcagattctggggtctgcccactgccctttgctctgcctgaggccagaggctgtggtggggactggccacctatgtgcctggctggctgcccccggctcctgccagttacagagccagccttggcggaatgggggctggggacggccaaatccagggggactctggagtcaggctgtccaggttcaaattccagttatttcacctccaggctgggtggtcttgggcaggtagcttaacttctctgagcctccgt

SEQ ID NO: 12952 - DNA, 1500 bp, Homo sapiens
tagctaagctcaaccccaaatggagcccccacttcagactgatccaatcctaggcctccactgagcccccataccactctgagcaccaaccttcagtccttaccctgggcagacccctgtcccttaggtggagtccttgactgcagacagagtccccagccttggcctccatgaagtcctcctccctgccctgacctgcatgttttctttgtccccagccccaggccagccagcctgcgacccccggccccgagagtacctgatcaagctccctgaggactgtggtcagccaggtagtggccctgcctacctggatgtgggcctctgtcccgacacccgctgccccagcctggcaggctccagcccccgctgcggggacgccagctcccgctgctgctctgtgcgccgtctggagagaagggagattcactgccctggctacgtcctcccagtgaaggtggtggcagagtgtggctgccagaagtgtctgccccctcgggggctggtccggggccgtgttgtggctgctgactccggggagccgctacgcttcgccaggattctgctgggccaggagcccatcggcttcaccgcctaccagggcgactttaccattgaggtgccgccctccacccagcggctggtggtgacttttgtggaccccagcggtgagttcatggacgctgtccgggtcttgccttttgatcctcgaggtgccggcgtgtaccacgaggtcaaggccatgcggaagaaagccccggtcattttacataccagccagagcaacacgatccccctgggcgagctggaagatgaggcgcccctgggcgagctggtcctgccttctggcgctttccgcagagccgacggcaaaccctactcggggcctgtggaggcccgggtgacgttcgtggacccccgagacctcacctcggcggcgtctgcccccagtgacctgcgcttcgtggacagcgacggcgagctggctccactgcgcacctacggcatgttctccgtggacctccgtgcgcccggctccgcggagcagctgcaggtggggccggtggccgtgcgggtggccgccagccagatccacatgccaggccacgtggaggccctcaagctgtggtcgctgaaccccgagaccggcttgtgggaggaggagagcggcttccggcgcgaggggtcctcgggcccccgggtgcgccgggaggagcgcgtcttcctggtgggcaacgtggagatccgggagcggcgcctgttcaatctggacgtgcctgagcgccgccgctgcttcgtgaaggtgcgcgcctacgccaacgacaagttcacccccagcgagcaggtggagggcgtggtggtcacgctggtcaatctggagcccgcccccggcttctccgccaacccccgtgcctggggccgctttgacagcgcggtcaccggccccaatggcgcctgcctccccgccttctgcgacgccgacaggccagacgcctacac

SEQ ID NO: 12953 - DNA, 1500 bp, Homo sapiens
ggacaatacccaggctttcttgggcagaggtccctgtggctttccgcagtgcattctgtccctggttaatcgagaatggagaatggtgatgacttttaccaggcatactgcaaacatattgttaacaaggcacatcccacacattcctaaatccattaaaccttgattcaatacagcacatgtttctgtgagcacagggttggggctaaagttacagcttaacgcatctcaaagcagaaacaatttttcttagtacagatcaaaatggagtttcttatatcttccttttctacatagacacagtaacaatctgatctctctttcttttccccacaagcgtctgcaggcttccaaagagaggggctaggagatgcaccaacacagaagcacaaatacaccagcacacacagatacacacaattggttcacatattgctaggttacagtttgctatgcgacaaaggcagtggaccagatttgattgaattgaacaattccttcttttcatcagcttctcaattttttttttgagacagagtattgctctgtcacccaggctagtgtgcagtggcataatcctggctcactgcagcctccacctcccaggttcaagtgactctcttgcctcagcctcccgagtagctggaattaaaggtgcccaccaccacgcccggctaatttttgtatttttagtagagacggggttttgccatgttggccaggctggtctcgaactcctaacctcaagtgatctgcccaccttagcttcccaaagtgctgggattacaggtgtgagccactgcacccagccagcctcccaattttgaacacacactaccaccacctccacaacacacaaatgtaaatgcactttcatatatgaaactgtataaatacaaggaagctccacacgtgcaaggatatacacataagcacccccagattcaaccacagaaacacacgcctgcacatttgcataaatacaaacaccactttacatataaaaatcatataagcacatacacggatgcaagcaagcatggagaaatgcacggaagcataaacaaacagacaaagctaagtaaaaaagtgtgcatgctcacctgtgcttacaaaaatacacatactcatacacaaacacccacacgttcacatgcttaggtggactttgatatctctaccactgtatccctgccaacatctagagagtggataagggataggcattaggtcgctgggttgcctaagcaggaagtctgggttccctaacacctttttctaagctaatgctccttgacgataatgagaaaggaggcggggaatggatgaagtttcataactgagtgaagaggcaggttcaggataaaaggcccagttagaggctgcagtggggtgcagggcagtcagactggaaccatggagctcagcgtcctcctcttccttgcactcctcacaggcctcttgctactcctggttcagcgtcaccctaactcccatggc

SEQ ID NO: 12954 - DNA, 1500 bp, Homo sapiens
ctctgtgggtactggcaactttaaattattctacactattttcagaattgaacacatattataattgaagagaaaaacaagaaacatttttattttttattttttgagacggagtctcgccctgtcacccaggctggagtgcagtggcacgatctcagctcactgcaagctctgcctcctggggttcacgccgttctcctgcctcagcctcccgagtagctgggactacaggtgcccgccaccatgcccggctaatttttttttttttttttggatttttagtagagacaggatttcactgtgttagccaggatggtctcaatctcctgacctcgtgatccgcccacctcggcctcccaaagtgctaggattacaggcatgagccaccgcgcctggccatttttaaaaaggatatgactcaatctgatccaatatgcttttatttatttaattaaatttttttttgagataatcttgctctttgcccaggctagagtgctgtggcacgatctcggctcactgcaacctctgcctcccaggttcaagcagttctcctgcctcagcctcccaagtatctgggattataggtgcccgccaccatgcgcggctaattttttgtatttttaatagacatggggtttcaccatgttggccaggctggtctcaaactcctgacctcaggtgatccacctgcctcggccttccaaagtgctgggattacaggcgtgagccattgcgcccagcccccagtatgcttttagagctcaacttcttttgttctgtcaatttaacagcttctgaatttgacctctagagcttctgtaaacacagttttgctgttaatgccttttgaatatatttgctaaggcctaggacaaccccttgtagtatagaatctggttatgttatagtaatttaaaaaggaatctcttctgtcctgttaccaggtaaaatacttttccttaatacagaatgcctgtttcatttcctgtaactttatctgactgaacttttacaaggacagtggttaagctgtgtaaagtaaagacattatggattgagaatccatgtggtttgatctacgctgtgtttgttttgagggaggggacccgttaggcttcattattgcaagaaaaaaacactctactatgtgttgtcttgctcaaagcactcatgctctggcccaaacccagattcctgaaggtggtcaaagggcctattcacccttattttttgctgggaggtggagggcagttggctaagtgaatgtatcagcttcttaagacgttcttttgtgtttcttgctttcagatggaaagaactccagtggatccaagcgttataatcgcaaacgtgaactttcctaccccaaaaatgaaagttttaacaaccagtcccgtcgctccagttcacagaaaagcaagacttttaacaagatgcctcctcaaaggggcggcggcagcagcaaactctttagctcttcttttaatggtggaagac

SEQ ID NO: 12955 - DNA, 1499 bp, Homo sapiens
caataccctttcagaagcaaggagtcccctttttctccgcctccagcctcagctaggttttcctcatttcggatttttctactgctcattcccaaatgagtcacgcatgacgacaatttccactctgctatgtcagcctggagatgtcccccaagtgatggcatctgctctcggaaagaaaggtcatcggtgccacgaccagccccgctaacccagagcggccggtgggccccagtcccgagagtcagggcgcgcggcggaggcgaggccggggcggcctccgccctcccggccgctccccctcgcgccgccccggctcctccctccggccctcggcgggcacctggcggcggcgggcagggggcggcgctgcgcgcgtcacgcggctgggtgggatagcgggcaggtgacacccggcggcctcctcccctttccaacccagtcggcggccgggacagcgggggccgctgtgaggagctccgcgctcgcgctgccagtcgccgccctctctcccgcgcgcgcccggcgcttcggctccgctccctgtgcggtgagtgcggggttccaggccggcgggcaggggccaaactttcccggcgcgcggaggagaagagactggggagggaggcagagccgaggggaacggcgtcgggagtggccggatggaggaacttgggcgcggcgcgcgagaagtgggacccgggtgcgggggccccgggagcggggccaggccctccctgggctcgggaggcgcttgggaagttctgtccccgctgcctgcgcgtggggaggaccgaggcccttttcgccggagcgcggggccgcggcgctcacctgcgccttctcgggagcccccacccggcagcatcccgaagggaaggtcgggcccggtgggcgcgctgcggagcggagcctggactggggtcccgcgcggcgctggccctgcggagcggagcgggaggggcagaggtgctcgccggcgggactgggagggagaaggacctgctcgaccttggacgcggaggtcattttcccagctccggggtctggcctcgctagccacccccccaaattccggagcccctttctttctgtttccttccttcccctttgggcgctttttttgctcccgcggccagatgaacttggggcgctgtcccttcggctccccgagccgcatcctgtcttggtggctgctgctggccgggaggaggctgatgaatacagagccgtggaacaggtcgtgccggagatggaaacaggaaagcctgttgttttgtcgtcccaggtatcgttggttctttgggaaatgggctttcccaggttcgttgggaaatgggctttcccaggttcgttgggaaatgggctttcccccttcaagtcagagctgtttcaaacttcacccggtgcggacagagcgctctttggagctccctggggaactcgggacgggaaggagcgggtctttacacctgtcctgctcccagtgtagttagtcc

SEQ ID NO: 12956 - DNA, 1499 bp, Homo sapiens
ggccatgctctttacaatttaccacactttctcctgaaaaaaagtggaagtagcactatccgtagaaaataatgttctaggcaagagtccattaatagtctcgggagataaacagttttaactgccaagagggagaactcacctggagaatttaatgaatttgtaaggactaccatacagttagctagtaataattttatgtgattcatacaattgtgcaccattctgagatcagtgtacttcgtgttcttaacactatctgtaccattagagagcatcagaaaagcttaaaacccatagtcaaggcattcttaaaatagggtctgtgatcataaaaattctttctctcgaagtacttgcaaatgaactggaaaggtgtgtgcccccaaaataaaactaactgtggattaatattaaactgctgggtcaaagatagacggacaactaattaataaacacttaagaatgatgttaggctgttttgaacagggtgggtaaattttgggaattaacactgcaggagaaaagggaaagaaaatccagagtgagggtgggggcctacggcggtgcaatacttagggacattccaaaacttctgaactcctaagttagataataggtatctagaggtgtcaaaacatttcagaaaaactatttttgtggcgtgagtggactggctgcagaagtggcaaaggacaaacttggatgcagggtttggcaaatgttgggtgagccctaatctgtgcctggtgctagggaccctacagcaaagttcctcttttcaaagtttaaaaagttgggagtagacactaaatattattaaatatttaatattaatatgtggcatattagaaagtgctacatggtactaagaaaaacaggtgccagagagtctgcatttgggcttccacttctaaatagggtaatcaaggagaccctcatatttgagtgaagaccccaaactcgagtgctggcggccatgtaggggggacggcagggcgggagaacgagcgtcgcgttagcagaatttacagtacaatggggtccaacggatgcccaggaaggcgaaattcctgcaagttaaacgcacttctaacgcaaaacttaaccaggcccctttccaactatttagcccaccaattttagcttaagtctcttcttccccacgccactcccagatgaaaggaagacacgcctcgttggcctccagagctctgcgtccggggggcggacctctcatagctccgccccgtgacccgcgcgcttgcggaggggaggtcaaaggtcagaggtaaagaagtcatggcggcgctgtgtcggacccgtgctgtggctgccgagagccattttctgcgagtgtttctcttcttcaggccctttcggggtgtaggcactgagagtggatccgaaagtggtagttccaatgccaaggagcctaagacgcgcgcaggcggtttcgcgagcgcgttggagcggcactcggagcttctacagaaggt

SEQ ID NO: 12957 - DNA, 1499 bp, Homo sapiens
gtaatcccagctactcgggaggctgaggcaaggagaactgcttgaacccggaaggcggacgctgcagtgagccgagatcgcgccattgcactccagcctgggcaacagagccagactccttaaaaaaaaaaaaaaactcataatacctactcatagggctgtaatggagattaaaggaaacaagaatggtatgtaaagcatcggatacaaggtagggaagaactcaacagtggcttttatttaatgatgctgaaggtaccgatgaaacagagaaataaagggatcaatctttctgggagcttcagtttcatttataaaaagaagaagatgagttagcataacatttctaaggctcttgccacttctaagactgtgatcctggcattttattatctagagaccaggcagcgagacattgatgggcagttggtgttaaagtgagaaaggcggtatctgcgcagactgcagggtcgaaccatgagcaagcaatcgtatctgccacaacagataagaactggggctggccggcctgacgactctcaacgggttagacgcgggctacgatgaccttcacgatcttttctggcagctacacggccacgcagggtgggactgctctgcctacgaacagcactgtgtgcgaacacagggccacggttaagcctcccggctgcctcccccagggaacacgacccctgagaagattccagacagtctcgcagaggcacggggaaggatggaacagagccgggagctcggtgggaagaggggcagcccgcaccgcccccgggatgtcaccggcgcttctgggaaatgtagtccttcgccgcgtccgcagccctgggcactcggaaggaggactacagttcccttcagccttgggaatgctttgtgcagcgcgcttgcgcggtgtggcggccgatgccgctataaaggcttgttttgctgcagggctcatgctcgggagcgtggttgagcggctggcgcggttgtcctggagcaggggcgcaggtaggtgatggctgctgccgcacccctgccctccagctcggttgtcacggggatcacccctttgcatttcctcggggcgtggcgggatgtggccagggctgcgagcagttcgggggacactggagacttggggaacggcgtatggcctccccctggtctcctgccgccgcctcctaggcctgtgagcccggggtctggtgacggggtcgtgtgctggaagacaggcaggtaggatcgggatgagcgggcagggacgcgggctacgtccctggccgcggccgccagggggcgctgcgcccgcgggccgtgggtgtgggtcgcgctcgcctgggcaggccggagcgggctgtgggaacgccctagggcccgggcatcccaggcgaagcgggtctgagagaaacgcccacctgggaggctgtgcagcgggtggctcggggcaccctgctcaacccgcagcggagccgccagcgaccttcgaagtaagtcat

SEQ ID NO: 12958 - DNA, 1499 bp, Homo sapiens
gcccagtgtgtttccggttctgagtcagggtgatctgtggacgggaccccagcaccaagtctacgggtgccagatcagtagggcctgtgatttcctgtcagtgtcctcagctaatgtgaacagtgttggtctgctggttagaaactagaatattgatattttcaggaaagaaatcagctcagctctccactcattgccaaatgtcactaaagggtttagttttaaggagaaagaaaaggaaaaaaaaaaaaaacaaaaaagtcctgttttgctttgcagaacaaatgaacttacaggtgagcattaagcttgcagtgagaaatgtgcgaagagtaaaaacccaagtcaatgctgaggcagttctaacttcactgttttcctaaatacacatccttgattattttcagccttgctatataatctgatctgctagaagtgtatgagtgagaggcaatagcatacaaactgattttttaaatataagcttaggttgtaattgtacaagtgactcaatggaagtacaaaatagggcagttttaacttttttttctgcttctatggatttcattttgttgtgttttcaaaaagttatggtgctgtataggtgctttctgtttaacctggaaagtgtgattatattcgttaccttctttggtagacggaatagttgggaccacctttggtacataagaaattggtataacgatgctctgattagcacagtatatgcatacttctccaaagtgatatatgaagactcttttctttgcataaaaagcattaggcatataaatgtataaatatattttatcatgtacagtacaaaaatggaaccttatgcatgggccttaggaatacaggctagtatttcagcacagacttccctgcttgagttcttgctgatgcttgcaccgtgacagtgggcaccaacacagacgtgccacccaaccccctgcacacaccaccggccaccaggggcccccttgtgcgccttggctttataactcctctgggggtgatattggtggtgatcacagctcctagcataatgagagttccatttggtattgtcacacgtctcctgcctcgcttgggttgccatgtttgagcgatggccctgttgatttcaccctgccttttactgaatctgtaaattgttgtgcaattgtggttatagtagactgtagcacattgccttttctaaactgctacatgtttataatcttcatttttaaagtatgtgtaatttttttaagtatgtattctattcatatggtctgcttgtcagtgagccagacttgcttactatattcctttataataatgctagccacttcctggattctttagtaatgtgctgtatgcaagaactttccagtagcagtgaaggagggttgcctctccaagcttcctaagggatgctgccctgtgtggggatgcattgcagaggcactagtagcatgggggctagagtggggagcgagatgtaaaagggtggg

SEQ ID NO: 12959 - DNA, 1499 bp, Homo sapiens
caggctatgtctccaccatgtaacttcagacaagttcctcagcgtctctgtgtcctggttccctcatttgtaacatcaggatattgataaggatcatagtaatagggatgtccttatggggcctcatgaaaatgaagagttctctgtgatgtgcctggaaccacagagggcagcaagtgggagccacagaaagtcatctctttatcatagttgtcattggtaactatgacggttatcaagggcaggggtctcccaccttctgcatccaggccttgtcattccttataaaattttctcctttcaaggactttcaatgccctgaaaacggaatgctcctccctgctccccatcagctgctgcagagccctgaaccccttgaacttgccttgcttagttctttcaggggctgccttggatgccacctcacttccctcttcttggctctgtggctgtcagaggggctgggcactgggttacttcatcagttcctgggtgttgatcggcaggaaacagtggtttcctgttcatatcctgcctgagcctgggccgggtggaggtgtcctgcatggagtcttgtgaaatcgcgtggactgcaacacccagcagcgcggtgagtccaccctgaaatccacagtgacccacgcggcatgtgctgggaattgaacgcttggggaaagagctgggctccagcggatcagccccgaccaagtcgttcccacagctcaggaccggacgctacaagcccactttgtagcagtttggcggacggcaaacttttgcaacacagtgcaaaaaccatttaacacctttaagggaattggaaatgggtttttcatgtgtggtggtgctgaaaattgagaataatgacagaattattaaaaacagccttctcggccttagactcttaattgcctctggtctgtaaaactgacaaataagcactgtagaagccacagatgaaatatgtcgtcttgggagccctggagaattgtctctgaattcttttgtttatggattgtagaaactgctttgggggtagttggatgtagaagcagaaggacagagtggggagctgggagcaggaggcctgggtttgtctcctgagtctgtttccactggggcctgaggctcccgtgtgagggaacatgaatgggccaggcacatgggccctgtggggtgacagagctgtgggctccatggtggctctgtgggcagctagcttggggatggctgagataaagacaagtagttttccttcctgcaggacttctcagagcctttagtgtggttataatgatagaaaacagtattaagtccataccctgaaccagaaacaatgctaaaagctttgcacttggcctttttttttctttttcttttatcaacatgtgtgaggacggaagcttaggcttacagatatggactcattgagagtgagtggacgtgtctgatctttaacccagttctgtctgaccaaaaagcctgtgctctaaccactg

SEQ ID NO: 12960 - DNA, 1498 bp, Homo sapiens
cggaaatttaaaaattggactgctttctatcagggcagtctgaattaaagagctgatgtccagtctcctagtggagatagaatactgggctaatgcctgtcactagcacttacagaggtgtgaatttggtaaatcatttcatctctgaagtggtttcaacatttgtgaaaagaggcaaactatttgcctaacaaaatgttgagttcaaggttattcatagctcctaccaaataagcgatgcatttgctactttgtgttaatggaaaaggacttaaaaattatgatatacttaaacccggtgctaccaaatgtgcttaaatacgcattcaaattgtattcttttaatgaattttaatattctcaactagtatcaatgctttgtcattattaagtgttgacttcaatatttccctcccctcaccgcaactcctagcacacatgcactcgaaatgttctcaaatgatatgtattgagcgcatgtgactaacaacacagccacctaagccctgacttgccggacacgaacggacgattaattggaataattgtaacagggtttctataaacagtgcttcctggaggcttgccccgcgtctagcgctgcaccgtcaggagttaaccactcctacgacacccgccgccacacggtgagaagcccgggaaagacgcgccacgctcccatgtgatagtttcacttgtctttttggttagttctgctaccctagttcatgtccccgcgagaggaaacgtattccccctcacattagacagaagagcctcgattcaccgtggaggctgacggagggccactccagcaactgagcagctcggacttggcacaggcagggtccagcctacccgcggccggcgcggcgcctcagcaacaccccctcccccggaagtttgtgcgtctcagatgtaaggtctgggagtcaccttgacccccctggagcggtggggaaagttagccctgagcccgagggggcgtgagtgaaaccaaagagcactttcgcgagtcagttacgccgtcacggttttttggtttcaaggtagctgaagacctagagagtttaagggtggccagagcaggtggcaggactccgcccaccaccacgcttcccttccttcagcccgcacgcttcactcccctcatggggtctcgcctctcaggcgcgcgcgaagagttgtcgcgcggtgcgtcctgggaattgtagtcccgacgcggagagtcgcctcaggagaaatgactctggcctacataccccacagtgccttgcggcgcaggccgctcccggatgtgtgcctggcgccggaagagaagacggcccccctctctcggcccggccatcttgtgggaagagctgaagcaggcgctcttggctcggcgcggcccgctgcaatccgtggaggaacgcgccgccgagccaccatcatgcctgggcacttacaggaaggcttcggctgcgtggtcaccaaccgattcgaccagttatttgac

SEQ ID NO: 12961 - DNA, 1498 bp, Homo sapiens
ctcataactgcacagcgtttttgtgggatttcgtgggcatgatctcatccgagccttccaacagcccttgggaggcaggcagggcaggtgtgggaggcgactcggccccaggcgcacatgggtaggtaatcagtgggaaagtgtccctagctgcttcccttccttccccaggataagtgactgtcaccaaaaggcccccccgagatcagcaagcttggcctgtggccttttgctttttcacacccacagaaggggtgaagctggggctctttgcaggcaacagcagccgcacccgcccgagtcctgagctccacgtcagcagggcaaggggacggatggtgttgtctttctctggccatgcatctcagtttgcatcctgctgtgcaggatgaattggagggcagaggtgagtaggagagagcagttaggaagctcatcaaagcatggtaggaaaggaggagagtccgagctggggcggtaccagtggggacagaaaggattaaccctgagaaggtgcccggggtggggcctgctggattcagtgactgatgggatttggtcggtggggaggaggaggaggcctgggcttctggccagagtgactaggaggatgttgatctggggagtgcctgtgtggctgagggacacgtccaagctgcagtcggctctgtggttgtggacacctggcagagccatgccttctctagtctgggtcatccaaacacacgtggggtgcaggggccaggtggagccctcttgtcgtttttgttatctaacggtaattacggagtccagaaagagaattggaaatgccggcagtttaattaaagctgaatggcaggagaggggcatttggaggctccctccctgccttcactccccgtcctgccgcccaggcaggatgtcagatgaggagacgttgagctcatcaaacacccaatgagaagtcttacaacatcagaagctgtctgccaatgcgcctgcgacagcttatagaaactgctgccgcctcgaatcaacctctctccccaggcattgcacgtcagtaggtaaccaggtaaaggacgccgggggtgggcagccagctggagggggcgtgatttcctcccccaacaaaatcggcttccctgggttctgagcccatgatatcatgtttttaaacccgattttccatctacactgggagctttgaagttcgctcggtgtggggaatcacgtgctcagtgaaagacccaagcggagagactggggagctggttcccctgggcctgacactgcggagctgaatgtcaaagcagggccctcagagaccaaagcggagggtaattatcacttctccacaactagattgcaggagtcagccagcaattgatttttttttctacttcagatatttcattgtttaattggtagtgacacagatggctggctcgcatcagggcgtcacagtccgactcgcgaaagccaggctgtggggactgctgcctctcctgacatc

SEQ ID NO: 12962 - DNA, 1498 bp, Homo sapiens
taaatgggtaattcgctgtttggaagtaacttgggccttgcggtgaggtcgcacctcctcagcccctgccctccccccagccaccttcgcacattcactgccgaaccagccagatttagtttctagacagactctgccaggggagtttcgagggggcaatgcggagagtgcgcagcgaaccgcgggccgacaaatgtgtgtgtgtccgagtgtgtggatccttggctgcgtgtgtgtgcgtgtgtgtttgtgtgtgtaggggagttgttctcgggtccaggacgtagtagccttcgtctcctccaccccccgaccctctcaacggaagaccctccccaggaggcccggcccaagagtcccctgtcttctcctcccctcccccgtgcgctccggtgctcaaggggttagcactatgcgcgcagaactcggagccatccccgcggccttttcttccccgcggtgcggtgccggctgccccctgttggccgccttgaggtaggactcctgcgagcctcggttccttggggcgggcgggcgggcagctgctcccctctccctcccacccctgctcccttcatccctcccgaccaccagaccccactctcccagcaggggccctcggaggcccccagaggaccagtttcgctgcgccgccggccgctgcaatacggaaggggccacgggtccagcccagcaaatgggactcggccagctggacacagggttggtacctcttcttctgggcttgggaaggagagtgtcgccctaggaggcctcgggtctggcctcagctgcctcccaactctctatgatcgagaacaagtgttgctttcccgcttttcgcctcactttaatcgtctattaaaaagtgggagagaaactacctttaaagagtgggggttggactatcatttcattttcttcctctgtccaaggactctgctccacctctggacaaagttgatcctctgccgagagggctagacatcctatgtgagaaggtgtgagtggtgtgtgtgtgtgtgtgtgtgtgtgtgtgtgtgtgtgtgtgtgtgtgtatcctggggcctggaaagcccagtctaagggatggacgagggggcaggaaacagaggagaaccaggccagaccgttcttcccctggggcctctctatacccgaacctggaacctgctgtcagtgttgaggcctgggcggctctcttttgtcatactgattctggctcaaggtgtaacctccgccttctctatctggcaattccctcctcccctaccccgctccgcgcgcgccaacacacatattgctgtggacacaacccttgcgcccaggcgtgaggcttagggagtagtggctcctttgtctgctcccctaaagcggacctcctacccgcctgggccggcccattctttagctcctcgcgccgctccccgcattctccagggcaggacgtcccaagtttttggctgcaactgagtgctctcctgctagtttctgcatc

SEQ ID NO: 12963 - DNA, 1497 bp, Homo sapiens
ttctttttgagacggagtcttgctccgtcttcaggctggagtgcagtggcaggatcttggctcactgcaacctccacctcccgggttcaagcgattctcctgcctcagcctcccgagtagctgggactacaggcatgtgccaccatgccctgctaatttttgtatttttagtagagatggggtttcactatgttggccaggttggtcttgatctcttgaccttgtgatccgcccgccttggcttcccaaagtgctgggattacaggcgtcagccatcgcgcccagagcctggggcttctaccacaccctctgcactctaccaggtgcacaacccaaccagtttcatttctagacttaaaaatgatacagcaaggacttggaaaggagctctctggagggctccagagggaaaagagctgggtttgtttgtttgtttttaacattaattgagtaatacatgcaaatatcgtgctctttgctcctgcttctgtggatccagagcaaaggactgccatacccagagagagagcccagatccaacaagctgcttctgtccagcccttctcctccctacttagcaagggcacttgctcttccctattctcaccagagaggcacaagcgctccgtcccttctagaggcaggcagagggaagagaaagggtctgttgtttttctctcctgtttctcgctccctctctgctgatcacaaagctgctgaccgggtcagaaagtcctgatggaaatccaccagcgctgggcaggcccctcctcctccagggagcttgtccttgcctaatttttcttcgtcctgatgagaacaaaaaagagagagagaagaaaagaaaaaccacaaacttcctttgaaaaccagcttgtagtcagggcccggagcgcatgccatagactcggcgactcaggaatcctgaagactctctgagcgacctggagcaccttggctgtgtccctgcctgccttcaccctcctccagtgcccccagtactgggcgtgagtccggaagtggccacaacccagcctggaccgtcgcttataaagctgtgtaaacctgtataagctcaggcgttgacagctggaaggcagctggcactggcagcccccttcattgcacctatctcccccatctcattgccacggctgaaccctccttctcaatcttggaacagcacccccttctttaaggtaaaaactttattttaatcatcttcttcacctcttctcccacccttctctatttcctctccagctttggggagctgacacctgctgtccttccacctttggtctgcaagtctggattgcttagaggagctaagtcaggagagacatgtaaaggggatgctgcttggtcctcctccttttaatgaaagcacgaaaccttccccctctccttgtgagcaagtatacagggcactgtggccatggttgacatattctgagatgaaaatctaaactattgattgcacaaagacataggtca

SEQ ID NO: 12964 - DNA, 1497 bp, Homo sapiens
cctcctgtctactggctccaaatagaccatgtcagcttcaccccctggctttgtgtctatgggtggcctgtggtatatggaaaagtagcagggtggtcagggtgggagacacaagatgtttttatagtctagagcctttaaaaaacccagcagaatgtaattcagtatttgtttattggctgttttttgacagattgttgaaattaaatgaattgaaagggaaactcagagtactaggacgtttattaaaaggaaaaaaatgtcttgcaatgtgctgtaatcacaagaggagaaaataacttgtttccttgatctgtcagaggtcacagtaacctgggccgagctgttattatttattatataatagtagtaggaagttaataactggttctctgtgttccaagcacaatattacaacttcttttgaaccgtaaatatcagaatgaatcctcttcccaggggattgaacagaagcttaatgtttacaagtgtttgaatttgtgatctgaaataacacaaaattaaaaacatgatttctctaattttccaactagaggaagagaaacttgtggaaaagttctttttttttcttttttttttcttaaagaagggcagccaaggtagtaacctaaaaatagtgcccaggcatatgagagttgtcctacgaggttaaagaacacactgttccactgtatggctttggccctgagtggccagggaggtcaacttgaccctgccatgttggtttgacttactaagacacaggaatcactgttttccttgaccagggtctcacaccctggaggaatgttaagtaagagaaagaacctctttcctgaatattgacatgtaaaagaccaaagtaatttttctgaacttctgcaattctgagaactctccaaggaatttacagtgattttagtgcttgtcagcatttttccatgaggactttcatacatttgactctttagttcacaggttcccattgattgtgagcaagatatttatctctttagcccttggggatccagctgagagcaatctcttgcatttttttacccgtgtatgtacagatatcatttcttgtgtatgccatgacttgaaaaagtttgggaagctctttagcaatatcagctaaaaggatatgaaatcacaggtgatagcagttgtcattcagtaatttcctacaagcagcaccccaaaggaaatatagtcctaatctttactatccacttctaaatttaatgtgaatttcatacatgttattagttgttttctttataattttataaaaattattcatcgggagtttaacttccacttccatgctatcggatgtgttgggctccatgcaagaacttggaagaaaaacaggcaggaatgcatttgcataatgacccagatcatcattttctgcaactgagaattatatttcatcattgcttctagaagtctgcaattctttacttttctttggtgcattattatctaggtgcc

SEQ ID NO: 12965 - DNA, 1496 bp, Homo sapiens
aatatttggaggagcttgtggctggggtggtttccatgccaggatctgcttgcctggactcctggagccacgagggcaaggtggcagtgggagagtgagaggtggcatgtgttagaacactcagggtgttcacattacttgggagatgctggagttcatggtagtacctcgagccggtggaagtggttggtcatttgctgtagtgacaatggctgagtcttaaaaagtcagtaggacttattggaaaaccaccaggtttgaaatcagactgaccagagttcagtctctgtgattcctcgccttactggcccgtggcctaaaacaagttacatgactcctctgagcatcattttctcctttgtaaacagggacgatgttatctgctccaccagggtgattgtgagaattaaaagtgatcatgtgtgtaaagcacgtaacagagccctgcacgcaatagaccctcatttagtgccggctgccaccacagccaactctagtcttgctatctactttgccagcaaacattacaaccttgcactggatatctaagggaagaatgagaggttctgaaaggacgtaggatctccagatgcatgtccagacctctttccaatgtgctcacatctctttaacttctgttggccttcagccctacgggtaaatcacttcaacagctgcccatgtagggctgataactcaggactcaccagctgggagaggactgtaaccaaacttaaaaatagagacacatccattgcctggtgcaggggctgtgcaggcctctggagagaaggccaggcagcatctgcacacccaggctgagttggactctgggcagctggaggcttcaagcctcacgacgaaggggaccctgccaggcaagcccggctttccttggtccagaagttctgagggtatgtgtcctcatcctctcccccaactagcactgcctggctagagactgaccattcttcagagaaagaaaggtggagagggtgtggggccaggtgtgggggagatggggatccttaggcttagcagagctgtctgaagctgggctgcactgattccgtgtagcctttggtataaggggatggagagagccactaggtggctttttaaaggaaagtaaggcagtcctatctaaggtgaatggaaagtgagctcaaaaagataggctgcaatatgattgatctaatttcttgtttagccccaaaccaggtcactgtgtctgaatagaagtgtgtcagaaacaaaccagagagtgcccacagaacaaggcccacacagaaaggtcaagccctcctgttgagggaatacacccagatagggtgacctttgtgcccagagcagagttctctaatattgtcgttaaattgtgtctgtatctgcttcctccatggcctccccttcctctgtgcaggtgccaccatggagtctgaccactgctgagcagacagccaccgagggccgaaattctgagccttcctctggac

SEQ ID NO: 12966 - DNA, 1496 bp, Homo sapiens
ctcccccactgtatgaatgagtcaaaggacaggtccagagaggatggccagctgaaaagaagaaaacctgaggtcatactctacagctgtcaaccctcagtaacccagacctgcctccggccacaaaagctgccttatggctctctagccacatgtatctgaggagctctctatctcggggggaggggagagggggaggtgcagaatcacaacaggaggtgtctcaccatcagccgggcgtggttgatgttccaggtgaaggtagtcatggtctgattctgtgggtccacaatagagtcctccaggacgtacaccgagtgagcaacattggcaggaaatagtcgctcggcccagcgtggcatcctgttggtcttggtcaggagtcgccgggacagcagtttctggtcaggggtcacctcccggtgtactatgtcttccgtcaagacatgtttgctgcaggtgtcagggtgaaggtgaccctcagaagcttgcccctaagagactgcccgaggggattcccatttggaggctccgggcctagagaggccacgccttcccgtaaccttgcagggtggtatgtgctatggttcaaaccagagttaagggcccatcccagggcaaattcccactcccgccatctgactgacctggattcctgccttctagcaggaatggacctcatgatttattgcaccccaggaaagcgccacgggcagagaaataggatttccaactccaagatccctcccaactcccatactgccgcctcttcttgtctcaccacactgagaaaagaatcttacactaaggtctcaagtaaaccaccacccaggcccaacctcccttcaggaccttgcaggcctggcctggccgcttccccgataaggtctacctaggattcgatatcgagtccttcctggtcccagtacttgggggttacccataattcgatctccagatagcgagatggcgcggttttgctcttccaaataccacgtacctatagggattcgggtaccgctgccagaaggcggcgaacacttggtcccaggaactccggagcacgctctggcccaggaaatacttcaccatcgtcccggccgaagcgggctcagcacccgcgcagcatcaggggtgcggagcctgggaggcacgcgagggccgggccgggccggggctcggcgcacacccgccgccaggctcgtagctcagtcaccaccgcaccgcgcccaagcagctgccgccgccgccgccgccgccatgagttgtccggccgcgcgccacttccggcgcagccacacagtagccaccgcttccggcgcccgcgccacgtgaccttgcggccccgccccctcgccctctagccccctcccgcgggagtcgcggcgctgcgggtaggagccgggttgcgggagaccccaggttcggttgggattcccagccagaacggagcttaagccgggcaggcgagcgaatgacggagtagcgagctgcac

SEQ ID NO: 12967 - DNA, 1496 bp, Homo sapiens
atacataccacaggcacggaaagcgccaggaggggaaagaacaggatgtttaccagcaccttccacaggcagccacggtcatgggggtcaggacagggtccccagaggaagtgacgattcggctgagctagaaagacatttccacaggaacttacagtaagggctgcaaggacagcctgtcctcccccgcccaccacctcactaaactttcactgtggcaatcggcattccctaagcctgccaggaagcttccagtaaccacttcctgactcctagcatgacacacttcgggccttccaaggttgacgatctaaggcccttacacagcgccagacacgcgcaggcagggaggcaggatgtgcctctccagacaggaatgtggacgccacctgggctcttcccctcagcctccacaggggaagaatattcttgtggggtttttcccttccaaatgtctcagggcgattccagtgttcccgctagttcctccctcccaggctagaacacaaatccttcccactccctgcctggcaaacaccttctgaccctcaggcccaaggcaatggcccacctcctcccaggctggatggggtctcctcctctctgttcccccagcccctgagcttcctgaggaccaagcttgtggcttcttctccttactcttcctccttggtgtctctatgttagagggccgttagcatctgctggggcctggtcgcattcaccctgctctgccactcactggctgtgtgactctggacaaattaacttctctggacctgcagtttctcctctctacaatgagaatactggagagtccttatcttatgggttgctacagaattaagtgacatctcacacacaacacacttcctacagtccctgttacacgctaaaagtactcaacatgcaacggatacgtcatcagtaaccaccccacgggtttactgtgatgctgcacaattattaagccttggctgctacagagttgtaacctgtctgcacttccaaccggtttgggaatgcaagcagcattcccaagtcccgctttcacccgcgcgctaacggctcaggttcgagtacaggacaggagggaggggagctgtgcacacggcggaggcgcacggcgtgggcacccagcacccggtacactgtgtcctcccgctgcacccagccccttccgcgccgaggcgtccccgaggcgcaagtgggccgccttcagggaactgaccgcccgcggcccgtgtgcagagccgggtgcgcccggcccagtgcgcgcggccgggtgtttcgcctggagccgcaagtgactcagcgcggggcgtgtgcaggcagcgcccggccggggcggggcttttgcactcgtcccggctctttctagctataaacactgcttgccgcgctgcactccaccacgcctcctccaagtcccagcgaacccgcgtgcaacctgtcccgactctagccgcctcttcagctcgccatggatcccaact

SEQ ID NO: 12968 - DNA, 1495 bp, Homo sapiens
agtaaccccaacactttcggaggccgaggagcgaggactccttgagcccaagagttcgagaccagcctgggcaatatagtgagaccccccccccccaccaccgtctctacaaaaaaaatttttttaattagccaggcgtggtggccgcgcctgtggtcccagctgctccggaggcttaaagtgggatgattacttaagccagagttcgaggctgcagtcagccgtgttcgcgccactatacttcagcctgggcgacagagaccttttctaaataataaataagtaaataagtaacgtgccgcctcttcactcccaattccctccgcctttccccgccccgcctcgtcgaagccggacccgcggcggcccgcccctcccccacgaccagggccgggaactgcgggtgcgcggggcgggagtcgggcgggcttaggcgcggccgacacgtggggagggaggccgcggcccaggaggcgggcccggagtgggtgtgggtgtgtccgtgcgtgggagaaaccaacctcagcctcctccgaggcgccacgtttcagcacggctcgttgggcccgggaggtcggaaatcagtccccacgccccggaccccctcctggagggacaacgaacacaggcgcgggacggcttcggtcaccgcccgcgccgccctttgcccccgtgcctgctcgcgcgtcacccccgccccggtgcggtggtagggcccggcgcgacgtcacccattgtttacaaatcaacccgagccggcaggattccggctccagcggctgcaggcgcgtggctcgagtgcctggcgggctccggcttccgcgtccgcccctgctccggcttcgcccgcagctccgcgcccgcgggcaaccaagcccccagcgaagcccgcacagctccgggtgccaggacggggggccatgccgtgccggagggaggaggaagaggaagccggcgaggaggcggagggggaggaagaggaggacgacagcttcctcctgctgcagcagtcggtgacgctgggcagctcgggcgaggtggaccggctggtggcccagatcggcgagacgctgcagctggacgcggcgcaggacagcccggcctcgccgtgcgcgcccccgggggtgccgctgcgggccccggggcccctggctgcggcggtgccggcggacaaggcccggcccccggcggtgccgctgctgctgccgcccgcttcggctgagacggtgggcccggcgccctctggggccctgcgctgcgccctaggggaccgcggccgcgtgcgcggacgcgctgcgccctactgcgtggcggaggtcgccgcaggccccagcgcgctgccggggccgtgccggcgaggatggctcagggacgcggtcacctcccgccgcttgcagcagcgccgatggacccaagccggggcacgcgccggcgacgacgacccgcatcggctcctccagcagctcgtgctctcgggaaacctcatcaaggaagc

SEQ ID NO: 12969 - DNA, 1495 bp, Homo sapiens
tgctctctcctctttctctccaaatgacctggggttggaagttccgggtcctgcccattcccagtgggacctgggagagcaaaggcggggtagctttgtgggcctctctctgagccccttcccttcccgcagccacggctgtcatccctttggccgcctgggtcacacattgctcaggaagaagctgctgtcaggtccttggaggccacatgaccttctcaaaagtaaagccaggaggacagagcgaccctccctggggctgggtcaccctgccctcttctaccccccatccaacgtggcaccgagtctgccactcagtcattccgtctgccaacagttcttacagcccagctctgtgctctgctctctgctggctccaggaggggtcctcactcgctgaccacactgacctcaggaccaagggaacaaaacacagcaggggcaatccatccggtccacggagaagtgctaaaccccaaagggtaaatgagattcccacaggaggagcagggaggagacaacaggcagggtggagggaacagcatgaggaacagcatttgagcccagcgtgtgtggcctccatgtgctgaatgcgtactggataccaagcttgctctacggaggccctgtgaaggtggctgtggatcacagatatcctcagctctctccagagctcaacacagtaccagatgctccagaaatgtttgctgaactgaatttgactggaaaggaaaacagagccccaggcctgcgcggtggctcacgtctataatcccagcactgtgggaggccgaggcagacggatcacttgaggtcaggagttcaagaccagcctggccaacatggtaaaaccccgtctctactacaaatacaaaacatagccaggtgtggtaggcaagtgcctgtaatcccagctacttgggatgctgaggcaggagaattgcttgaacctgggaagtggaggttgcagtgagccgagatcgcaccactgcaatccagcctgggtgacatagcgagactctgactcaaaaaaaaaaaaaaaaaagaaaagaaaacagaatcctgagctggttatgattctatcattaccaccacttaggaaggacctggatccatgaaaagaccttacccactttagctctgaccccttcagtctttggaggtgaatatgagtctccctgacattcagtggaggaaactggggtgcggataggggtgttgctaccagctaggtcctccctaatgcatttgcccattccaggtcccagctgcagggcagccatgagcctggtggcctgtgagtgcctgcccagccccggcctggagcctgagccttgctcacgagcacggtcccaagctcacgtgtacctggagcagattcgcaacagggtggctctgggagtgcctgacatgacaaaacgtgactatctggtggatgcggccacgcagatccggctggccctggagcgcgatgttagtgaggactatgaggcgg

SEQ ID NO: 12970 - DNA, 1494 bp, Homo sapiens
tatttattgctcatcacctgccaggtattgtgatggaagctagtgcggaagatcccccaatgaccaggatcgcccgacccctgttcccagggtgagcccctagcgcggagcggggacagggtggaccgagtagggcgcagtgctggtctcgcgaggctccctgccccacggaggcagtagcaggacccaaccgttcctaaccgtccagggaccaggacagcgtctggaataaaatcttccaaagcaaacttccgcctgcggagacccgctcccttcctcgcccccacagaaacgccccccgccaccaccccctcccccggcgtaggccttcacgctgtcgcctcgacccgtttcctcgaatccccagggaagggtgggcccctggcgcccctatggcccgccgcccccttaccaccgcggtcggagcccgggtctcactctcctgccgctgtttcgggccacaccgtgtgtccgtgcctccgcaaaggaatagaagagtgggtcctcgctctctgcggcgcaccgcttgtcccttgacttcctgtccatctacaaagcctatttcatgttttccagaaagaaaacgttttccgtgtctcttgagtcctcatcgccatatgcggggcgggaccgatctatgcaaaagatcgcaagagaaaactgatggagcatcgcccatcatgaggctgctctcccgatggtcactgagttgtgttgtggcactgtctttgtacaaagacaccaatttttgcgaacggtgccactcatgattcaacgctctcatgcctcggtcccagctgctggagcgcagattttcctccaagggttagaagatagaaaactcctcggtaattggcctagaggtggtctgcgaggacgccgggaagcttgtaattggctgtttaattctcagcaggtgcggtctcagttaacaacatctgcttttcctggatcttattggctgacagggtgggcctgctttggattccatccgggtaattgggcagcggctagcagcagccacgtcgctcaggggcagcccgcggaaggattggttgtgacgggagaaggcgattggtcggactgcgagcagggtgttgattggtgctgtcgggctgcgggggcggggaagtggcggctgaagcgccgccggcggggctcactgtggtggtgtgagtgggaggcggcggcgctggtggctgcagctggggtgaggcgcgaggcggcgcactcgacggctgactggagcagcggtaaaggcgaggatggagaccgaaggtttggggagtgggaaagacagggtcatgggcagccctggccactaggagacggaaatgcgggagcgagggaagggaggggtctggcgtgccccggggcgagggaaggatgtggggcgcagcgggggagtcagagccctgggctgtgagacgccgctcgggggcaacttgacccactgggaactcgtaactgtatctgaggaagatgctccagtca

SEQ ID NO: 12971 - DNA, 1493 bp, Homo sapiens
atggaagcttgggaagactttgttggaaggggaggcggggagagagtgctggaggctctggggcgatggcttccgcacctcttccaaccaccctctttccctggagtcggcggaccacagctcagccaattggcttggagatgtggcgggttgccacttccctgtgggtctctgcggcactcttctgcctggtgactgacaccttggaaatgaagtttatgacgtcatcgttgcggctggccaatagaaaaagctcccgcggagaggtgttccttccccttcgactcagcttcttcacccgcgtgagcgagcgcgcgcgcgcggagggggtggggaaaagctcaagcagggtggcgcgcatgagcggcgaagctcctcctccccgcctatatataaagggctggcgcggggctcggcggcgccatttcgtgctggagtggagcagcctctagaacgagctggaggattctgcctaccgatacagagccttcgagtcgtccggggccgccattacaatccacctccatccgcttggaaatggccttcgtcccggcctatgactggtcccagcgggcagtacagaccccctagaagcccctggagctcccctttttcgggccccgcccaatcctcggagtctgtccaccccctctactccgccctcaagaggatttcaaagatggaggcggcggctccctaaaccacttttcgtgttcatccgcctccatccgagatcgaaacgggacctcgtcggccccgtaggggcccgacaagaagagggaatccctgcagaccaacagcgggctatattgacgacggtgtctgagatcggggaccgtcttttgaagagtcagtccctccttagttgcccgcctcagctgaggccgccgccattttcttgctgtccgccgtctgcagagcgcgccaagctgcccggagctctccgagaggccccaaagagactgctttcgtgccggccaggcagggggtttgtcgcctggaggcccaagaggaacggcctccccccaacttagcgggttatgctggaccgggcggtgaggggaaccgaggccacccggactttccgcggctgagggcagcgccggttccttgcggtcaagatgctgcaaaacgtgactccccacaataagtacgtttccgcgagccgcgtgtgggaaggggatgttgcagggcggcggcacaggggtgtggggcgccgtgttgggagtactgagcggccccggcgcgctgctgttgcggcgcagctgtcgactcggtcgcgcggagggaattgagcgacggttttggaacggtggtggcggctcggctactgctcgtggaggggaatacaggttgtcaatttatacgctattaatgccgccgtggcccagtcttaaccgagtcaggcagagctagtttgacggtggagtggagtgaggttgaacagcaggtttggcgtttggtgggtctggtatctagcggcggtctgttag

SEQ ID NO: 12972 - DNA, 1493 bp, Homo sapiens
aagtgtgtgtgtgcgcgagtgtgtggcgggcccggggagggagttctgctcccgcccccgcccccgccccgctccctctgcgccccgccccctcccacgccgcctcctcgcggctcccgggaacccctggcggaggcgaactcgcaagtttgcacggcgctctcaactcggcggccgggcgggcggcgatcgcggggcggcggcggcggaggggggcgcgctccgggcggggctgggcgggcggggcgcgggccgagcggtggcggcggcgctgcgccgagtcagcgcccgtcgcgggccccccgccacccccccgccggcgccgcagcgccgcggtcggagcggggcgcgggcgcgcggcggcgggggcgcgggccgggcgcgcgcggcggcggcgcgcagacacaagtagtttacattgttgggcgacttttgcaacaactcgccgcgccgcggcctccgcgcgccgccgccgccaccgcagccgccggctccccgccgcccgggcccgggccggccgcgccgggggccgccgcgcccgccgcccgctgcctgcgccgccggccgggcatgagttagtcgcagacatggacaccaaacatttcctgccgctcggtgagtgctcgccgggccgggcggggacggggccgggggccgggggccggcgggcgggagggggccgggggcgcgttggcggcgcgcgcggggggtcgccggcccgggccccgctcggacccctcgccgaccttcgcgtgagttcgggcgccgggcccggggagggtcgacccggggcaacttttcgcggggccggggcggggctgggcagcgggcgggcggcggggccggggggcgggtggcaggttcgcccgggacgaggaggggtctcccgctcaccggcggccgcctgcgccccggcgcccagctgcagccgcgccgcacaggaacccggccggagcgggaggagcaacttctgcgctccgcggctccggcctccctggcctggggaccgggacggcgcgctgggccccgagcggcctctgcgccgcccgcccgtcgggctgcggcttctagcaggccgctggcccttgggtgtgtgtccgcccaggaaacagactgggaccctgttatccccaaagcagcccacgcccgggtgggcagggtcccccggggctgtatgaacagaacgtcagacctgggaaggccccattccagaaatggggcccctcactctggcacccccgggtgttctcccaggctggctctccatttgtgagcaggacagcgcagaggcgcgtagggtcagtttccctcctcctcctgccatcccgcccggtagcttcctatcccagactgcccgccaactccaggcccagacctaccgagaagggggagagggcatggctggggcccccacccattgccctcccaagggtttggaagctagtgagaagggggagactttataaattagctccgggaaggatattaatttg

SEQ ID NO: 12973 - DNA, 1493 bp, Homo sapiens
tgtcatttgcagtagaacccagagaacattatgctaagtgaaataagccaggcacaaaagggaaattattgcattatttcacttataggtgggattttgttttaaaaaagacttcaaatgcacagagctagagaatgaaacagtgaataccactagtgggaagcagggaagaggaaaaggggtgatataggtcaaaggatacaaaatagtagacacgtaggatacataaatctacaacagggtccctaaccttttcggcaccagggacaagttttgtggaatacaatttttccatgggcagtgggggtaggtggatggttttggaatgaaactgttccacctcagatcatcaggcattagattctcataaggagtggcgcaacctagatccctcgcatgtgcagttcacaataggaggcggagctcagtctgtaaagcttgctcaccggctgctcacctcctgctgtgcagcttggttcctaacaggccacggaccagtaccagtccatgctggggagtttgggacccctggtctagagagcaaacgtgcaaaatgaggactaaagttaataaaattgtatcatattaggaatttttgttaaataagttgattttagctgttcttgtcatacacacaaaaaagtaattacgggtgagatgatacatatattatattggcctccctactgtaaccatttttctgtgtatatgtatctcataatatcatgttgtaaacctcaaatatacagaatgaataaaacaattagctgtcaatttggccttaatgttccatgttaaagccaaatgtctatgtttgtaatcagctaaattttatattgtgcagaagccctgaatttcacggatgccccatatttcatggatgccccgttcagttcataagctcttgtttacatgatttgtgcatgatccaaatgtggaaagaaaatgagtgggcagcctattctgggtatcaagcaaagagcacaggcacagaccatgtgcaataagcagccttaggcaaaactgaaccaagagtggtttcatacaggtattcctctaagtctttaattttttacttattcctttcccctttttaatgtgatagacacctaatcaccttctgctgccttcccaacctcaactttggtgttctttggcagatagtgacttcggtgttctttggcagatagcctacaaatgaaatttcaaaggctaagcatataatgtttgctcacttgatgtaagcaacagagaactaaatctgaactttggcaaaagtctattaataattgacaaataacagaacagtgaggatgtagaaagcaatacattaaaaaaaaaaaaacaacgaactccatctgggatagcaataacctgtgaaaatgctcccccggctaatttgtatcaatgattatgaacaacatgctaaatcagtacttccaaagtctatatatgactattacaggtctggggcaaatgatgaagaaactttg

SEQ ID NO: 12974 - DNA, 1491 bp, Homo sapiens
atctccttctcccctccctagtctggctgaagaacgtccttaaggaaatccgggctgctcttccccatctggaagtggctttccccacatcggctcgtaaactgattatgaaacatacgatgttaattcggagctgcatttcccagctgggcactctcgcgcgctggtccccggggcctcgccccccaccccctgcccttccctcccgcgtcctgcccccatcctccaccccccgcgctggccaccccgcctccttggcagcctctggcggcagcgcgctccactcgcctccgtgctcctctcgcccatggaattaattctggctccacttgttgctcggcccaggttggggagaggacggagggtggccgcagcgggttcctgagtgaattacccaggagggactgagcacagcaccaactagaggggggccagggggtgcgggactcgagcgagcaggaaggaggcagcgcctggcaccagggctttgactcaacagaattgagacacgtttgtaatcgctggcgtgccccgcgcacaggatcccagcgaaatcagatttcctggtgaggttgcgtgggtggattaatttggaaaaagaaactgcctatatcttgccatcaaaaaactcacggaggagaagcgcagtcaatcaacagtaaacttaagagaccccggatgcttccgttgtttaaacttgtatgcttgaaaattatctgagaggcaataaacatctgctcctttcttccctctccagaagtccattggaatattaagcccaggagttgctttggggatggctggaagtgcaatgtcttccaagttcttcctagtggctttggccatatttttctccttcgcccaggttgtaattgaagccaattcttggtggtaagttcattctatgtgcgtgttcttcctcttctttttctttttttaagatttgtttgtatgatgcggcaatatttaatgctggatagtgagtgtgggtgtatttattgcaagacatatgtatacattttacttatatatagttttaaatcagaattttcttttaacttgttaatattgtaaagcttatcttcagctcctagggaatgggaaactataaatctaggcctgtttctatgaagcccttgttcagacgtgtgcttgtagtacatcatgcaataaaaaagaacagaaattcactttgctagtaattgtaagcctatctacaaaatttactttttgccacctctaggtagtaaaagtgagtttcagcctttatcttctgttactcgagattattattaacctacagagtttgaattaggcagagttctaggaggacagctacactccaagtgcagaagtattggggcttgaaatgtaatcaaaaggaggttaacttgaagtagtcaaatgtccccaagtgggggtttctttctgggtaggggccttgtagatagactgtaatatatccagaggattatttttgacggcattctg

SEQ ID NO: 12975 - DNA, 1489 bp, Homo sapiens
gagggataaaagaaaggtcacggccaggtgcagtggctcacgcctgtaatcccagcactttgggaggccgaggcaggtagatcacaaggtcaggtgatcgagaccatcctggccaacatggtgaaaccccgtctctactaaaagtacaaaacaaaaattagctgggcgtgggggcgcatgcctgtagccccagctactcaggaggctgaggcaggagaatctcttgaacccaggaggcggaggttgcagtgagacgagatcacgccactgcactacacagcctggcaacagagcgagactccactgaaagaaagagagaaagaaagaaagagaaagaaagagggaagggaaggggaagagggaagggaagggggaggggaaagggaagggaaggggaaggaaaggggaaggggaaggggaagaggaaggggaaggggaagggaagagaaagaaagttcacagtgtaaggccaggcgcggtggctcacgcctgtaatcccagcactttcggaggccaaggcaggtggatcacgaggtcaggagatcgagaccatcctggctaacacggtgaaatcccgtctccactaaaaatataaaaaaattagccgggtgtggtggggggcgcctgtagtcccagcttctcgagaggctgaggcaggagaatggcgtgaacccgggaggcggagcttgcagtgagccgaggttgcgccactgcactccagcctgggcaacagagcaagactccgtctccaaaaaaaaaaaaaaaaaaaaaaaaaacttcacagcatggagagcaggcccacttgggacacagaatgggcatgtgtcaagggccctgggaggaggtgctggaaagggacagtggagaaaagggggggacagccgatcagtcccctgggccattctgcttgcctcctcactaagaatagtagcatctcccctcgctcccactgctttctgtggctctcaaaatgctttcgcatgcattttctcactacagcctcagaacaatctttaggagtagtgttatcttccccatttcacagatgagaaagctgagactcagggaggccacataactcgcccaagaacacatagccaattagtggcaggtatggggctccatttaagtatatgaccccgctctggttcagtattcttatccccaccccaaataaagagaatcacacgaccttattgtgataataaatagcaactgtagtcagagggagagaggcccagggaggaacaataatctaactaagacgcttgacattggaaactcctggagggcagggcagagatcatgcaggagatttaacagcacccagcacagctgcccacgcggaggtgcgtctatgctgagctgccacagcaaggctgcagtgcctggcccggagcttggtcacgctgacctccacggcaggaactgagagcagcatctactcccaatcctgcataagaggtcatagaaacaccctacagcccag

SEQ ID NO: 12976 - DNA, 1488 bp, Homo sapiens
gaacatatttcagggttgtcccaccagaggagtcagggagctggggtagttactcctacctccttcccattaatagctgagggatgctccacatgtgataactccaggcatttcagcctgccccacctgctcaggcgaaactgggtccccctgcagccagaggaagcccacaggcaggcagtcttgggtgcttgcagaaaaacccctcgttggctgagcccaggaactgctgaggtcagaacagagcaaacagaaactgggagggaaagagtgtaagaaaacggttaaaatcctcaaggtgacaaaggggacagaaggactgtgagctcaccagtgtacctggccgatgaccacatgacacagaggaggtggggctggggtttccagggtcagggctgggctaaggaggaagcagctcccatgggcataccatgtccatgcccctcacggacctgctctgtgttcccttccctgtcctagggatgagctggacaaccaacctgggcgtcagactccaggaaatggcagggtccttagtcctcctgtcaccttctagcttctctctcttcccccattctgccctgcctgaaaccccatgcacttgctccctaggtgagggcagcgtgacatttctaagatgatatctcctctctctccagcccagacccacagcctgaccctgtgacaaaggccccagagccatcactctgcaaataactgtggctgggtgagaggtaccaaagccaacgtgatgatctgagacagacacctgtaatttcacattcagaaaaacccagaccttcaaacagaagtgctatttcaattttctcactcccattcttctttaacctcagactaagaggggaataaaccctctttgatttgtagactgaattctttaaagagacagcttattctttttcaaatttattttttccttttgcttggggcagacaccagggtcccaaaatgggaatttggtaccttggttagatggctcaaactgccaaaagttactatagggaatactgcactaccaatccatttttcctgctaatccaaaagtcaaataagtccatggagggcttttttttcctctagaatttcaggctccctgagggctaatttctcggaaagctgcattaaactaatagcaccataaaaggcccattgtgagatgtaattggtttgcaggacttcctataaaaataataaaaagactgccagaggcagtttccaaaggtcaattatctttgtgttgcttgagttgagtggaggtcagtcccagaattccactttataggcatattaatcaaaactgggcctgcccacccatctgaccccatcagctgtgagggaagtcacaggtcccacccttaagctggttgccaaatggtgttttgggctcttcttttcccaagaagagactagcccattgtcaccaatgcagagctggaagctgaaattgttaaggcagaatgaaaggga

SEQ ID NO: 12977 - DNA, 1488 bp, Homo sapiens
acttgaagctgcacacaattgaaaacttatcaattacggcggggcgcggtggctcacgcctgtaatcccagaactttgggaggccgagacaggtggctcacttgaggtcaggagtttgagaccagcctggccaacatggtgaaacctggtatgtcctaaaaatagaaaaattagctgggcgtggtggtggtctcctgtaatcccagctactcaggaggccgaggcaggagattgcttgaacctgggaggcgggggtggttgcagtgagctgagattgtgccactgcaatccagcctgggtgacagagtgagactccgtctcaaaaaaaaaaaaaaagaaagaaaagaaaaaaaggaaaaaaagaaagaaaacttacaaattactgctggacttttccatttactatttttggactgtagtggatacgggtagatgaaacctcagatacgtgggagctaccgtgggtgtattaggctctctgatgttggatgaacagggacctgggttaatcttgccctactctctctaattcaggtaccagccagacgagaatttcagcaagaacgagaagccgaaggaggaagtagttgagatgaattctgtacccaaagcagaatccccagcatgtgttcctgaagcgtccagcactccggcgagtctgtggagccctgtcagcaccatccccaccccgagatggggccgcatcgtctatggatgtgcctttctgcttggtgagcagtggcgtttctccgcggggtgttttgaacctgatagcatgcggcagggggccgagtagggagtgtggggctttggtagttgagaggagttgtgaagatgtggtggcccttcttagtaggcgcacttttggccgggcacagtggattacacatggaatcccagcactttgggaggctgaggcgggacaactgcttgagcctgggcagtcgaggcttcagtgaatcaagaccacaccactgcactgtagtctgggcaatggggcgagatcccatctcaaaaaacaaacaaaaagccatatatatatatacacacacacacacatatatacacacacacacacatacatatacacacacaaatatatatatataaaattaaaagtttaggctgggtgtggtggctcactttagaaggctgaggcaagtggatcacttgaggtgaggagttgagaccagcctggccaacatggtgaaaccccatctctactaaaaatacaaaaaattaggtcaggcacagtggctcacgcctgtaatcccagcactctgggaggccgggtgccgggggggagtggatcacaaggtcaggagttcgagatcagcctggccaacatggtgaaaccccatctctactaaaaatacaaaaattagccgagcacggtggcagacgcctgtaatcccagctactcggggagactgaggcaggagaattatttgaaccggagaggccgagtttccagtgagccaagatcac

SEQ ID NO: 12978 - DNA, 1487 bp, Homo sapiens
tatctcacagatgaggaaaccgaggcacagagaggttaagtggcttgtctaagagctcacaaaaagagcgatggagctaaggcttggccccagatattagatcccgaacccacgccttaaccagtgacctgcactgactctcaaagaaggaagctggtgcctgggaaggagggtgcatagtgagggtgtgcatggggtgtgtgtgtttgtggggtggccagcactctccgggggcactttgccaatgagttcagctcccatgaagtccactgttgttctcctgaccagccactcagtcttgatttacttggcccagggccactggcacacctcacccccttacccgattccttgctgcagaccccaaatctcgactctcacatccctatccagcccataccacgaggctcccatctccaggcagggccctgtggtggggcagggcctcccccagatgccccttactcatgaccagctcacaggatcttcccatgatgcatttcctctggggggatcagcccagatgctgcaatagacaattgtggaagtaaccaggtggacaagactttccccctcatgtcctggggttcctgggggcacagtatccttgtgaatggccactgagtactcccacccctcccaccacaacccccgggattttgtcctggtgcgtttttccagattatcctagcccttcctcccaggatggatgtccagagcagggcgggggctgagcctagagccctgccaaaagagcaggaccccaaattctgagccccttacttgcctcacctgctcccacccatgctttcttcattcctcctccaaaagccccagctccccactgcaatcccttctgcacccagccaggtcctatgacacacacctccccagtgcacacagacctgcccaactgtggggctgcccactgggcatttcataggtggctcagtcctcttccctctgcagctggccccagaaacctgccagttattggtgccaggtctgtgccaggagggcgaggcctgtcatttctagtaatcctctgggcagtgtgactgtacctcttgcggcaactcaaagggagagggtgacttgtcccgggtcacagagctgaaagggcaggtacaacaggtgacatgccgggctgtctgagtttatgagggcccagtcttgtgtctgccgggcaatgagcaaggctccttcctgtccaagctccccgcccctccccagcctactgcctccacccgaagtctacttcctgggtgggcaggaactgggcactgtgcccagggcatgcactgcctccacgcagcaaccctcagagtcctgagctgaaccaagaaggaggagggggtcgggcctccgaggaaggcctagccgctgctgctgccaggaattccaggttggaggggcggcaacctcctgccagccttcaggccactctcctgtgcctgccagaagagacagagcttgaggagagcttg

SEQ ID NO: 12979 - DNA, 1487 bp, Homo sapiens
acccaggaactgaggtgagtgtccccatcctggcccttgaccctcctggtgggcggctatacctccccaggtccaggtttcattctgcccctgtcgctaagtcttggggggcctgggtctctgctggttctagcttcctcttcccatttctgactcctggctttagctctctggaattctctctctcagctttgtctctctctcttcccttctgactcagtctctcacactcgtcctggctctgtctctgtccttccctagctcttttatatagagacagagagatggggtctcactgtgttgcccaggctggtcttgaacttctgggctcaagcgatcctcccgcctcggcctcccaaagtgctgggattagaggcatgagccaccttgcccggcctcctagctccttcttcgtctctgcctctgccctctgcatctgctctctgcatctgtctctgtctccttctctcggcctctgccccgttccttctctccctcttgggtctctctggctcatccccatctcgcccgccccatcccagcccttctccccgcctcccactgtgcgacaccctcccgccctctcggccgcagggcgctgatggacgagaccatgaaggagttgaaggcctacaaatcggaactggaggaacaactgaccccggtggcggaggagacgcgggcacggctgtccaaggagctgcaggcggcgcaggcccggctgggcgcggacatggaggacgtgtgcggccgcctggtgcagtaccgcggcgaggtgcaggccatgctcggccagagcaccgaggagctgcgggtgcgcctcgcctcccacctgcgcaagctgcgtaagcggctcctccgcgatgccgatgacctgcagaagcgcctggcagtgtaccaggccggggcccgcgagggcgccgagcgcggcctcagcgccatccgcgagcgcctggggcccctggtggaacagggccgcgtgcgggccgccactgtgggctccctggccggccagccgctacaggagcgggcccaggcctggggcgagcggctgcgcgcgcggatggaggagatgggcagccggacccgcgaccgcctggacgaggtgaaggagcaggtggcggaggtgcgcgccaagctggaggagcaggcccagcagatacgcctgcaggccgaggccttccaggcccgcctcaagagctggttcgagcccctggtggaagacatgcagcgccagtgggccgggctggtggagaaggtgcaggctgccgtgggcaccagcgccgcccctgtgcccagcgacaatcactgaacgccgaagcctgcagccatgcgaccccacgccaccccgtgcctcctgcctccgcgcagcctgcagcgggagaccctgtccccgccccagccgtcctcctggggtggaccctagtttaataaagattcaccaagtttcacgcatctgctggcctccccctgtgatttcctctaag

SEQ ID NO: 12980 - DNA, 1487 bp, Homo sapiens
agtttctatgttcccatgccaaaataatctttttttttttttttttaggagtctcactctgtcccaggctagagtgcagtggtgcaatcttggctcactgcaacctttgcttcctgggttcaagcgattctcctgcctcagcctccctagtagctgcagtttcaacattgtaatttctacaaggcgcgtgccaccatgtccggctaattttttctatttttaatagagacagggttttgccatatgggccaggcttgtctcaaacttctgacctcaagtgatctgcccgctacggcctcccaaagtgctaggattacaggcctgagccgctgcgcccagcccaaaatcatcttcgcttcacttttggtccttcactttcacgtcatgattctatggcgtgatgggaatgttcctggaagcagtatcttctgcaaattttgtgaaaacggccaggttaaactttgttagacccctctcccagggattaagtgtgatgatgggcataaaacactaagcctggcatgtagtcagcactgaggagttatcacgaggatattctaaaaggaaacatggtaaagacaagtggtgatggtgtctcaggaaagaatccctgagtccctgaggagcatcctgaagcagaatctcacagtatgacaggttaaagctgaatgtggctgctttagttttgtgtaattttgttagtcactttgcaacatggaaaaaaatttttttccttcagtattttatgaagtactactacataaattggctttcgtaatcctcacagcagatggggattgttggtactagtacattgtcatttcacagaggaaacccaagaggttaaatgacttccatagttgccaactagggggaggctcccactcgcgtcttgtattttgggctcctgatgctcaacatctcttcccaccacactcaagggtttttctggaggaagaagtttccaagtccacaagtgagtttttttcctcttggccaaaatgtgactttcagaatagaaaagagctcaggcgcagagaaacagggagactggagtctcattgagtttccccatctttgtcaccagagtaaaagaaggccattaagacttctgagatggaggaactggtcagggcccgggaacgccagagaacgtcggaggaaccgggagccgggtacctggtgtcaggccgccttgcgccttggagcccagccccgcgaacacctcgctgtcccgccccgcgcccacaggggccaatcagcgttcaggggcgttcttagccgcccccccccccccgctttcccgccccgcgacccggaagtggttctagggcaggcgggcgggtttgagagggcggggattgcgactctcacaccctgagctccggtgctcctttcctaactccactggctgcggcatctgtgggaaaagtgtggctgggtcttcgaggagccgcaccaatggcttccgtgctgtcctacgaaag

SEQ ID NO: 12981 - DNA, 1486 bp, Homo sapiens
taaatgctctgcaggctaaggtctagtttagcgagccttgctggttcaactacatcacaaaccagatggtcatggctacctttgttgcaggcatagtgcccagagggaattaagtcctccaaatgacctaaaattaggtagaaaatgtcactctgaccttttttcaatgtgttttaaacttgggcttgctttctttgcttaaaaaaaaacacttttattttttaaaattaggaaatagtcaaatggaacaaaattataaaagtttaaaaggtgaaaacttcctcccactcctctcccccagcttaattccatcctcaaaggcaaccagtgtagcaatgtctgtatatcctccacacggtttatacatatacaagcagatatgcacacagaaacacacattctcctctcgttttttacacaaaatagcagcatagtatgcacactgctctgcgcctggcttttaaaaaaaactcaatatatcttagagatcattccatatcagttactaagatttatttcttcatgtattccaagcacacacgaagcagcccacattatgataatttctctttcctcaatacttggcagttgattttcatctgtgttttccccttgctggtgaatgatttctaccacaggatggtccaatcacattctttgaattgccttccagataaaatatcttaataagcattagtgcttttgcctggaggataagtaaacaattttatgtgattagggctttgcaagcacattggtgtctcactgttaatttaaaccacatcttgaatgaggtcccttaaggtcataaagtgaggactccaagaatttatctgtcttctaaggctatagcatgttttctcttgttccagaaactagaatgaaccgaagcattcctgtggaggttgatgaatcagaaccatacccaagtcagttgctgaaaccaatcccagaatattccccggaagaggaatcagaaccacctgctccaaatataaggaacatggcacccaacagcttgtctgcacccacaatgcttcacaattcctccggagacttttctcaagctcactcaaccctgaaacttgcaaatcaccagcggcctgtatcccggcaggtcacctgcctgcgcactcaagttctggaggacagtgaagacagtttctgcaggagacacccaggcctgggcaaagctttcccttctgggtgctctgcagtcagcgagcctgcgtctgagtctgtggttggagccctccctgcagagcatcagttttcatttatggaaaaacgtaatcaatggctggtatctcagctttcagcggcttctcctgacactggccatgactcagacaaatcagaccaaagtttacctaatgcctcagcagactccttgggcggtagccaggagatggtgcaacggccccagcctcacaggaaccgagcaggcctggatctgccaaccatagacacgggatatgattcccag

SEQ ID NO: 12982 - DNA, 1485 bp, Homo sapiens
aagaacgtgccaaaagttcagaggaagaagcctcggcttcgcctttcgggagaccagtccagctttccaccatcacgctgctcatcagggaccatctccgggggtctcctctagaccccaagggaggagcgggtcccgcccgccattcccaggtctcagagtttacttgtccagagatgcaacttccggcctcttcaggccgggcaagatttaaggaaagaaaagaaacataaggacctccgttcttcggtctccgtcccctccccttcccccgcgtgccgtccccacaacgggccaggactgaacccaactctcgaccaactcccggcagcaaaactaagcaccctacttccgttgtccccacctgttcccggcgtccccttcggctactcccggcgtttgcgcaagcggtcccacgtgggctcgggcggggctagcgccgcggcgggggctgggcacgcccctagcgcatagctggcttctgattggctttccggtgctcgcccgagcagggttggggcgagtggaccgcgcctctaaaggcgcttgccagtgcaatctgggcgatcgcttcctggtcctcgcctcctccgctgtctccctggagttcttgcaagtcggccaggatgtctcaggtacagcgcgtgcacagccaggctgcgaaggtgcagcgggcgggaggcccgttgggggctcagccggctgccagaagctctcgggctctttccttccgtgcccctcacttgctcatgggcccatgcctagccctgattcgttggacagagccttgtgagcgggattttccgtttggggatttctaaatctgctgcccaccccgcaactgccggaaagttgcccatggggtggacttcgctgtgtagcgggagaggggtgggagtcgagggtgcttgatggagagatgggggaaggggttgcacggattggaggagcgaggagactcagtccccatcccgaagcacagggcaggacgtcgcggcggagtggggaagcgaggagtccgtggccgagagcttggaggtcaggggaagtacggggccggctgctcagagtgcgggacgaggagaatcgcggcccggggagaggtgacccaggggcccctcccttctctccagtgtagacccttgtctgagaccgagctatgtggggcgacctctggctcctcccgcctgcctctgccaatccgggcactgggacagaggtcggtgttgaacgcgcgggccccagggggagggaggggaccaacgggctccggcgctgacaccgcggcactcatgccctgtcccctttcagctgtttccagcatactgtgccccgtctgtcctcaggccagggcttcgctgcagccccggccactccctagtgcctggcccggtggtggccaggcagttggccgcgctgcttctcccgcagaggggacccccactgggggcgaaggcttggcctgccctcttcactgctgtattt

SEQ ID NO: 12983 - DNA, 1484 bp, Homo sapiens
ttttctcccatgttatttccaggaatcctgggcattcccttgccccggaaacgccgtgtccaggccgacctaagccaggagccgcaggggcgggaagccgggggcagggccgggcctgggacgccgcctcaggagccgcgcggactcgggaacctcgggcggggccggcgtgagtacgcccggcacctccggctgctacggtggcgaccgcgaactgatgccgtggaaaacacccttagaacatggctttttggggaggtgaataggggagagtccccaaacgacacctcgccgcgcaccggtccttggtgcagtttgtaaatgtccctcctgtgtcccaaaacgaaaacactcctatattttgtagcgccttccagaatggggcagcggaaactagtgttgggacaaaggaggcgagcggggccttttcggggctcacagaggacccctcggaggcgcggccgccggggagagcgcgacagcaccccgccccccgccagccgggcgggggccgctcccgaggtgacaggagaaggcgggaggtggaggagagaaggtcccgccccacctcgctctcctttacgggaagtgatgtggggccaggcggaaaatacccgccaacgacccaaaaaaggccggcggcgggtggacgcggcgcgcgaggacccgagccaggcggggacaggacggcggggcgagccaggtgagggggcctgaggagcgggaggcgcgcggcgggtccggtccctccgggagggccgagcgaggcgtccccctggggccgtcctagggctggggtccgagtgcgccgcccttcctccccgcctccaggcgcccgagcccgcctgaagagtggcttctctcccaggccctcagcgcagaccccagtgatgacaactgcctggtgctggccaggtgcggtcccaggtccggccagggtctcagatcgcctccgggttgcatccaggtgggaggatgcccatcaggggtaggaaactttccaggagggaaaggaggaaagtccccgacctcccgcacgccccccggttcattcctccctcttttgctttcagtttaactgtttaacctggttgccctccggttggtgagggtctggactgcagactagctgcgagggaggggctctctcttctcctgtcagttagactgaaaactacctggcagccaggccctccggtcgggactggtggtggtgcagatatgatgacaggctttggtaactattgccaaagcctgtctctgtcccaatagatcaccagttcagcaaagtcaggcctgaagcgaagggagtcttgtgagccctggactgaggagccttcccagcctttccgctcctgctggccacctgggcccacatggcctcagggtcttctgccacagggtccttacccctacagcttaacagctgttctttccttctggatggattctcacattttatggttggttgatcagtcagatgt

SEQ ID NO: 12984 - DNA, 1483 bp, Homo sapiens
tgtgtgtgtgtgtgtgtgtgtgtatatatatatatatatatatatatatatatatatatatatatatataaaattagcaggtcatggtggtgagcacttgtagtcccagctacttaggagagtgaggcaggaggattgcttgagcccaggagttcgaggccacagtgagctgtgactgtgcggttgcactccagcctgggcaacagagcaagactgtctcaaaaaagaaaacaaaaaagaaatataaaatgtaaagttgggttagttgtgtaagtgataaatgctgtgaagaataaagccagacaactttgggtgtacaggggacccctctgaggaggtgacatctgagcagagacctgactggagtgatgcaggtgtctgagggaaggaaattcctggcagcgggaacagccagtgcaaaggccccgaggaaggagttgcttgatttgttcaaacaatagccaggaggccaggtggctgcagtgagtgaaggagaggagatgatgaagggaatgacgggcgggcaggcctgcagaccattgtaaggaccctggagtccgatccgaaggggagatgctccaggaaatgtggctttacctctgggcgcctcagtctcctcttctgagaaacatgcaacatgacacctgcgtctgaaggtctctgtgaggactcagggagctcctgcctccacaggcaggaggcagccgcacaggtgaggccctttggctgcactggtcctgtgcaaccttgcagatttggggtgccctctctggactctgcattctccacactgtgtgtcaggatgggctgaagctgatggggctcattccttggttcccaaagtctggccttggcaccccctcctccatgctcctcttctgtctccttcctctttcttctcctcttcctccccatccctcctcctcctccacctcctccacctccttcttctccctttttgccctgttccccttttctccctcctccaccctcctcctactcccttctctttcctccttttttttttttctctctctcccacctcccccttccctcctccctgctctccatcctgaatcaacattccagtccatggaaaaaaacagggcaggcttccttcctctccctggcagggctccagagagggactgggccattgtgtattctggcctcaaggtcaccccgactccctgccctccccagtgtggttatttgagaaaaggcagcttgggtgagggggaagggattggggctgagaggggtatagtctgcctccccacccacggctggtggaacctgagggcccccggcgccaccagagcttcgtggcttaatgggggaggcgaggagccactgcggacctgctcgggacagtgaagggcgccagtctcagccctcatctgaaacctgctccgtgaccctggactagttcctgctcctctctgggccaaatcctggccctgctcctttctggctgagtaac

SEQ ID NO: 12985 - DNA, 1483 bp, Homo sapiens
ggactctcctaggccctttcaccacttctcacctctcacccacattctgcactcccagctaaagcagccaaaggactatttgatttggcagagctttcaggcacaaagccctatgttccctctggcccaaagccactactctgaaggctgaaaactgccctttggctcaggttgctgtccagtcacagcctcacagataatttgtgctgaaccttgaggtgagggcagaggccacttctttaaatactttgtcttctctactgccttacatttgaaaagcacaggttggatcaataagtattaaacgtatagcgtattactcctttgaagcctccctgcttgactcctccctttcctgccttctcattccctactttattgcatcacagatacgtaatttattaccaaggatctttcataattccccacccctgcctctttcttctcttgcccacactgtgtgacttaacagagtcaacaatacatataattccaccagcaacaaagaaaataagttttgttttcctattgtctgttttcatgaagaggcccttcttagttaatctgaaagctatggcttataccatagtcctccatcatatctaaagccaggaactagaacttgggcttgtgcttgagtcctgggtaaagaagggttgagtggtgctaattcttggctgtctgggtgctcttgattagtgatagaatcctagtcaacactgtcgcttatccagacccaggagaataaaaatctacttggctctcctactcttcattctggtagcatcttaggccaggtaaagttcaataaatttttttgaattctaagaagtgggaattcctccctcaactcaaaggctatattgtcaaaaactcaactcccggctctgtcgcttcttcactgagggcaatttatctccataatcaaagatgaatacattcagatgaactcttctgtgtgggtttaaattttactgttcagcattcagtcttgctagtaaataagaaaagatgagagaaatggattgaaaactcccacaagaccctctatggaaaaggagccaaaagattgcagaggtatatagaactttagagcttttgagtttaatgatgtctatccctataccttctttctggaaagcagatttttgtgaattgagggcaggaacattacagaactgatgcttcatggctctggaatactaagtcctctgagcctggatctccttcagctctgccacctacctccttgtttgctaaatgtccttagagaagttaggatatgcctggggaaccctgggtcatataaccatgacaactggctgaccctgttgtctctccctctctgccctcctctagctgggaggtggaagcagcattgcccaagcctcccaggagtgacaggaattgtttctgcctgaggagacactctgcagcctgggctctgtgagactgaggtggcggtcagccggagtgagtgttg

SEQ ID NO: 12986 - DNA, 1482 bp, Homo sapiens
gcatttccgaacattttattccaaggacacagtctagtcaaaagacgtttgggatagggtaaacatgaggcaaaagaacacttacaaaagaaaaaagcgcagtttcttggaggcttgtcagaagctaagactggggagatgagaaccagggcccttggcgagagttggggtgggaatcgcgtaagaaaagcaatttctagagcggaaaggtgaccccacattacaaaaagaaatggagtagaaaaataggcttgactattctaaagctgcttcagaaagaatctccggaagaccacggaggaaccccgcaggggagccaggcggatactcagccgctcgcggtagaagggcgcgcaaagctgcggagccgcgtgtgtggagctccccagtgcactcactgctggctccccctcggtgctctgggcccttcccagctccctccacacagcccggctcccttcacacacccccgccccctccgagctccccgactcctccccgcgctccacggctcttcccgactccagtcagcgttcctcgggccctcggcgccacgagctgtccgggcacgcagcccctagcggcgcgtcgctgccaagccggcctccgcgcgcctccctccttccttctcccctggctgttcgcgatccagcttgggtaggcggggaagcagctggagtgcgaccgccgcggcagccaccctgcaaccgccagtcggaggtgcagtccgtaggccctggcccccgggtgggcccttggggagtcggcgccgctcccggggagctgcaaggctcgcccctgcccggcgtggagggcgcggggggcgcggaggtgagcgggtcggggaggagcgcgaaagaaggtagcggcggcggagttgagggtcaagatgcagtctgcgccacgcgctgcatccatcctccccgattctgcgccctcaccgggcgtccgccctgagctgcggggtccctcatctcctggcaccttaaggtggaaagtgagaagggtggagaagggtgtctgttccactgattccccctcctcctcctcttggttcctagagctaagggcaagtcctgaggttgggcccaggagaaagaaggcaaggagacattgtcccaggtaggatgtgtcccagcaggaaaggacaggcaggttactttcgcccccttgatagtctccctgctactttgggttgatgcagggcatttcatggaagatcatgcagtgctgctttgcgaacaggtatttctagcagtcatttggtttatttcccagtaatgtaatcgtggtgtttaggccatttctgttagaaagtaattggcctcttctttgactgtcctaaattatctttgaaccctgtgttcagcctcagccaaaacttgttgaaaattatgccctaaaaatcttgctcttaaaatagagcagagagataaagagcatttttgttggaagatttccatttattatctctcccacccc

SEQ ID NO: 12987 - DNA, 1482 bp, Homo sapiens
acagaaagcttgctcctcgtagagagaaaatgtgagtcttggccatatttatagctgcactcataaacaagactcaggtttgggagtgagacaggctagagaacaggtgcagcagttgcttttccccaggaaatcctccaaaggtaagatgcattgaactaggttttaggtacctatgcagtgaacatggtggtgatgggaggggctgaggggaataggtcttgtttagacttgctcaatgtgcaactgaaacaagcctactggttgtcagacatgcagggggatcaaagcagggtttccttatgtccctgctcccccataaccagaacacagccttccagcttcctgtgccttccaaagtcagaatttacctgtgcccttgaactgatacaaagaaaaaaaataatcagcaaaactcagaaggaaacagaatcccaggaatatttccagaggtgcctgaacattcacctggaacacagagcagagttcctgcagggctaccctcctgtgctctgccccagtcagagtgcagggaggcgtggggaggtgacacagatggatggcaacagccctgggaaggagaggtgggctgggagccaggcctcatgaccagtaccagctagactccctaggtacaaatagccctgggctctgcagctccacaggctcctggggtggagtccaaatcactcattgtttgtgaaagctgagctcacagcaaaacaagccaccatgaagctgtcggtgtgtctcctgctggtcacgctggccctctgctgctaccagggtgagtacatcagtcatgagtctagctccagcccctgggaagcaccctcttccaagcacgaggtcacctattcaggctggggttaggatctgcacaaaaccaaaattccaaacctttttctgtgcttgttgaacaagcccctcatcaagttcagagctatttcttctactccccagcacctacgaagttttattgaaaatcagtgcaggcaaatattaggaattcttctgcctgagcttcactcctgggtgggatctgtgtcagatgatgtaatgtgaggtctggggtgaatctgggatccgccacttcccagccctttgaccttgggcacaatgctcaccctccctgagcctcctcctatcactggtagttagcgcttctgccaggagaggctatgagaatggagtaagaaagattaatactgtcaaaagagtctagctgtgggctaagcatggcggctcatgcctgtaatcctagcactttggaaggtcaaggagagtgaattgcttgagctcaggagtttgagtccggcctaggcaacgtggcgaaactccagctttaccaaaagaaatatgaaaaatcagctggacgtggtgacatgcaccagtagtctcagctacttagggggctgagatggggatatcgcttgagcccaggaggtagaggctgcagtgagccatgattgagctactgaa

SEQ ID NO: 12988 - DNA, 1482 bp, Homo sapiens
tgaagaggaaaaagggcctagaggctgcacagatgaggtcgccaggaggggcgagaaggagaccgagtagcgcccagaccttcgggcggggacgctgtgaccctgtgctgtaagagtggaacccagacaggagccaaggaggaagcgacgtgcttctgtggagctttaggaatgcggcggttagggccactggtttaggggagttggctggaagggcgtggccggaggaagggccgcctccaccaagcgcaggcgccctaccgggcgggagggggaggagcgttactcgcggttgcgccccgccccgcgaacaaatatttgacattccaggcttatcgggaggaggggcccgaggagcaacgttctcccttcccccgcgcctgattcgcttaccgcttccgggggaggagacgcatgggccagtgcccgggtgggcggtccggagatggacagccgcgcaccaaggcccgcctccacctgtagggaaagtaaagtgctactcgctcgaacccgccgggcgaaggaagcacttcccatgctctccctgtcgccgtgtccgggcgcgagtcatttccgtcccgggcgcctgtttctttagctgccaagtggagctacgctgagctctctccccccgggcctcgcccctttcccgggcatgagctctggtgatgcgcccgggtgccccgctctctccattgtccaggggccgggccgcagcaccctccttgtccgaaagcgcgtggtgcggctcccgtctcagtctcgagtcgggctaggcaaccgcgtgactcagttcccgccacgctggagccccctccttcctgctggattattcagtttctcagtcacttattcagtttctcagtcacctccctgggagagtttgggaaagtaaggaacggccgggaaacgcgccataaaggagcctcaccaagctccactgggcaaagggaggaatgggagccccaaatgcggggctgtcaattgggttgtaggtgcgggatggaaaagggaggatctgcagcccgcatgcgcgcacacacgctcaacgctagccccccatcggccagagcgctcgcaatctccaggcagcttctccaccgtccagaaagggacgaaagcaggcaggcccccacacgtggggtaggagtgaggctccaggcccgttctacccctctcagcctcgtctagggtgcagctctctgcgatttggggggttcctttccccagcattgaggcctgcccactcccaacccacaacgaccgcgctctggcacttctcagtgccaggctagcgctcggccctagcatctgcgtggacaagcccttccctgtgatccctggtgaccaccccacagctctaacaacgctgatgttcccgccgccctcccctttcccaggtgacttctggtgatccccctacagggtgatacccggcaactctcaccgcccccttgaccctttgacttccatcaaccccag

SEQ ID NO: 12989 - DNA, 1479 bp, Homo sapiens
ccgacaatgtaacataattgccaaagctttggttcgtgacctgaggttatgtttggtatgaaaaggtcacattttatattcagttttctgaagttttggttgcataaccaacctgtggaaggcatgaacacccatgtgcgccctaaccaaaggtttttctgaatcatccttcacatgagaattcctaatgggaccaagtacagtactgtggtccaacataaacacacaagtcaggctgagagaatctcagaaggttgtggaagggtctatctactttgggagcattttgcagaggaagaaactgaggtcctggcaggttgcattctcctgatggcaaaatgcagctcttcctatatgtataccctgaatctccgcccccttcccctcagatgccccctgtcagttcccccagctgctaaatatagctgtctgtggctggctgcgtatgcaaccgcacaccccattctatctgccctatctcggttacagtgtagtcctccccagggtcatcctatgtacacactacgtatttctagccaacgaggagggggaatcaaacagaaagagagacaaacagagatatatcggagtctggcacggggcacataaggcagcacattagagaaagccggcccctggatccgtctttcgcgtttattttaagcccagtcttccctgggccacctttagcagatcctcgtgcgcccccgccccctggccgtgaaactcagcctctatccagcagcgacgacaagtaaagtaaagttcagggaagctgctctttgggatcgctccaaatcgagttgtgcctggagtgatgtttaagccaatgtcagggcaaggcaacagtccctggccgtcctccagcacctttgtaatgcatatgagctcgggagaccagtacttaaagttggaggcccgggagcccaggagctggcggagggcgttcgtcctgggactgcacttgctcccgtcgggtcgcccggcttcaccggacccgcaggctcccggggcagggccggggccagagctcgcgtgtcggcgggacatgcgctgcgtcgcctctaacctcgggctgtgctctttttccaggtggcccgccggtttctgagccttctgccctgcggggacacggtctgcaccctgcccgcggccacggaccatgaccatgaccctccacaccaaagcatctgggatggccctactgcatcagatccaagggaacgagctggagcccctgaaccgtccgcagctcaagatccccctggagcggcccctgggcgaggtgtacctggacagcagcaagcccgccgtgtacaactaccccgagggcgccgcctacgagttcaacgccgcggccgccgccaacgcgcaggtctacggtcagaccggcctcccctacggccccgggtctgaggctgcggcgttcggctccaacggcctggggggtttccccccactcaacagcgtgtctccgag

SEQ ID NO: 12990 - DNA, 1479 bp, Homo sapiens
tcagttacacccccaacaaagttgctttttttaaaaaaaaggcggtgggggggtcgggtgcggtggctcaggcctgtaatcccagcactctgggaggcgggggcgggtggatcacctgaggtcaggagttcgagaccagcctgaccaatatggtgaaaccctgtcactactaaaactacaaaaattagctgaacatagtggcatgcgcctatagtcccagctactcgggaggctgagacaggagaattggttgaacttgggaggcggagattgcagtgagccgagatcgcaccactgcactccagcctgggcaacagagtgagattcagtctcaaaacaaaacaaacaaacaaacaaacaatctgttgccagtttcctaggaatgctctgggcttattctctgcattttcccaccctgcctctcccctcctccccctctcctctccacaaaagggaacacatcacacaggctgtactgctccttactttgtcagtctctggtgtgttttaggcttattccatatcagcacacaggctttgcctcattctttttggtggctgtgtagttctgacctcagtgctctaaagccatgcatttaagtgatttgtcctctgcttgttcagctctgaaatttgtcattacgcaggcttaaccctgtatcagttaggagccgcttttctattccaccctcttattgttaatatgtgagtccaagagattatgagttaattgagggcagggactcacatatccacatctctatcttccaccaaaaaataatgttctgctctgcaaatagcaaatacaaaaagcacagcacaaagttcgcatccagcaggcttcatcccagcagaataagcgagagggactcagcaccagtcagtcccattttggttagtgagaaggtggtgccttagggaagaacactgcatacttcgaaggctgctctagggtctgtaatcacagccctctgtgtttgggttcattcacacggtgtttatcttctgggatttgctccacaacacccttcaggaagggttttgaaggttgtggaaaaatcagtgtgtgcagccaacaaaagggcaacaagccaattgtggttatacagggctgttttaagagtcaagtcatgtttgggatgggggtggggtgcacagtcttgtatcaagcattttctgtagcagagctcaatcagcatctacaaggcagggctgggccactcctgcctctgagcctgtcttcagtagtgggtgcctttgtaacgagccagcctgtccccggacccaggcagagtgacaaaacagctacacattcatgaagaacactggctgtctccataacaaccacggttaacatgactctgtagaactatgggcgtggcccttgggtctcctggcctggctaccaacatgcctgtggcttctcattgggccccgtgagtgctggcagggctgtgaagcaggtgtgactaatgggtc

SEQ ID NO: 12991 - DNA, 1478 bp, Homo sapiens
tttcttaggagcacgtggagttctcctaggtgggcttgcactcggggtcgcccagccgttctttgagggttcgagtgggtaggcttcccctgtaggacgggcttccccgtaggtttccacgtggggccacagaggcaggaaaaggggaagtgggcactgacacctggggtgaaaaagggtgggggtgcggctttgtgaggaaagaatttgcagagactgctaaactggggtctgctaggataccccactccccaccccctgcctcgggcgccctcagccacccgagctgggggcctcgcaggtctcagaccaagctccccgcgcggcctgcagcgcacccaaacatggccaccgaacccgggttcccggggcacagccgcgcctctgggtgacgcagacgcggcgggttgcatcagcccgtgcccacgtgctcggtccgccctctgccacccggatccggacgccgattgggccacgttgggagagtgcctccgcctcagccaatgggcggcagccacagagcgttctgtccgcagagccgggcgcggggcttctataaaaggcgcccgaagcgggggcgcgcgccccagagacgtgaactgtcgttgcagagattgcgggcggctgagacgccgcctgcctggcacctaggagcgcagcggagccccgacaccgccgccgccgccatggagtccgagaccgaacccgagcccgtcacgctcctggtgaagagccccaaccagcgccaccgcgacttggagctgagtggcgaccgcggctggagtgtgggccacctcaaggcccacctgagccgcgtctaccccgagcgtccggtgagagcggccccgacttcccgcccctaggctgtggccccccgccctctgctggggatgccacgtccggctgccctgtcctgtggcctcctcccgctgacggctgcgatcgctcggccggtcacctcccccagggctgtggtctccccttccctgccccgccgacgcgggcgcccctctgttgcccagtagccgtcagtaatcagcagcctgaccttgggcgagtcatttcaccctccaagcctgtttctcccccagcggccaggcaactcggtgttcctaattgggcttgcatccaatggctagaagtaagaaaacatccgtgctgcaaaatgaggtttctgaacgcagcctctctgcagggagaggagcgggcaggtgccacccggggccgtggcttgagaaacctggggaccgcccagacactgtggacggaaggccccacacccagaagcaggacgtggctcttctcctccctggccaccttccgccgtgcccctccctgtcgcactggaccgagcagccattgccgagtcccggggtggagccccgtgcactttctgaccaagagcgactgagaagggaagcaggcaggagtcgccttcagtctggttttaggacggcagcctctccattattagcaag

SEQ ID NO: 12992 - DNA, 1474 bp, Homo sapiens
gggtcacagagaggcttacagaaaacgattcttgtgaattggcttgcagtaataattcaatacctgccagctattcttattccacatccaagccctttcgcctgctgctgggtgaaaacacatgtcagtgtttcctgacggtttccacaaagaagattccaaaattacaacctgccagtctgaagaatctccaaaacatcccgcacgcatcctggaggcgcgggcttggggatgggactgcccgcccgggtcctgaacaggatgcgtgcgcgcaggcacacacacaccagccagcctgtgtgtgcggccggagtccggtgcggtcccgggtgagcagcgcgtggctggtgggcggggcagagccattgttcgcaggcgtaccgagtcccccgcgctcgcccgggagggaggcggggcttcccgcgtcccccaagctccagatcctggggtggctgccacgtctccctgccacgcgcctggggggacggaagacgggacggagatgttagtggtgggcgccccccgagggttcaccactgtttcctgagaaacttccccagtgcccacccacccgttctccgtgtgcccgagggccggtcctgggctaggctccgcgccccagccccaaaccgggtccccagccccttccagagagaaagctcccgacgcgggatgccgggcagaggcccagcggcgggtggaagagaagctgagaaggagaaacagaggggagggggagcgaggagctggcggcagagggaacagcagattgcgccgagccaatggcaacggcaggacgaggtggcaccaaattcccttcggccaatgacgagccggagtttacagaagcctcattagcatttccccagaggcaggggcaggggcagaggccgggtggtgtggtgtcggtgtcggcagcatccccggcgccctgctgcggtcgccgcgagcctcggcctctgtctcctccccctcccgcccttacctccacgcgggaccgcccgcgccagtcaactcctcgcactttgcccctgcttggcagcggataaaagggggctgaggaaataccggacacggtcacccgttgccagctctagcctttaaattcccggctcggggacctccacgcaccgcggctagcgccgacaaccagctagcgtgcaaggcgccgcggctcagcgcgtaccggcgggcttcgaaaccgcagtcctccggcgaccccgaactccgctccggagcctcagccccctggaaagtgatcccggcatccgagagccaagatgccggcccacttgctgcaggacgatgtgagtttcccagcctggccccgtaccgccgggtcgcaggcgcgggctgggcttccaggggacgggttggtggcagaagagaggggagagctccgcggaggacttggtcatctttttcgagttgtgctgccttccgtgagttgggaatgtggattgtaatttgggga

SEQ ID NO: 12993 - DNA, 1472 bp, Homo sapiens
ctgggtttgctagcagaagtgtttctgagaaaacccttgttctgttatcgctgactgtactgtttaggttcttaccactaaagctgtttggttccaaaacggccatatgagtaacatcgtcgtgatgctcttcggttcatgtagccttgttattgctgatagtgaattgctaggctggtggggaagattacagtaaccacaagaagtggtgtgtgccagaatcccaaattctggcatgtgggtgacaagtttccgacatgataaatccccggcttccgacatgataaatcccaggctgtttacatgacctaagtaatgtgtacttgggactacgggaaatgttaactgtggctgttgagagagagagagattttcacgaaggacagtgctaggtttacctctcgaagtctgttttcagtggtttttagcttgtgccaatggatgacaaatctatacagaaacctgggtatagccatttgaaaatgtgaataacgttttttttcattccaggtttggtgcacctcgatttggaggaagtagggcagggcccttatctggaaagaagtttggaaaccctggggagaaattagttaaaaagaagtggaatcttgatgagctgcctaaatttgagaagaatttttatcaagagcaccctgatttggctaggcgcacagcagtgagtaaattcatgtggcttcatcaggctgtaactcgatcgtggattctagtaaatgaaattctgacaggtgttttgcaaataactcaattttggtagagttacatgttctgacttcataattgggaaaggtgtgactcacttttggatataggtggctttgggatttttacttaaattaggttgagtataacaataaattttttttttcataatagggtgttcataggtgggtccagattaaaatgaaggctactttaaactagttactaaattatgaagttaggggcttatcaattacgtatttagctaggggtggttgtcatgaattttaagactgttataatttgttttgcagcaagaggtggaaacatacagaagaagcaaggaaattacagttagaggtcacaactgcccgaagccagttctaaatttttatgaagccaatttccctggtaagtgctacttttcagttctacctacccgtgtttttgtttccacctaccccctctttttcttggcatcactaatttttactaaatatctgttactaattatagcaaatgtcatggatgttattgcaagacagaatttcactgaacccactgctattcaagctcagggatggccagttgctctaagtggattggatatggttggagtggcacagactggatctgggaaaacattgtctgtaagtttgggagaactcttgagttgatctgatatatgcaagaaaatgtaatggtaatttaaaaacgagtattttaatgtgatttctgtttgtccccacttt

SEQ ID NO: 12994 - DNA, 1471 bp, Homo sapiens
ttggcatggcagagattaaaaatgcaaggaaaaaaattacatgcggaacggacaaaatgttctcagagattacttcagaaaaaaaaaagtgaaatgcagattgtacttcttcctttagtgcagagacgacttttatttccgccccctcccctccacattcctgacctctccctcccccttttccctctttctttccttccttcctcctcttccaagttctgggatttttcagccttgcttggttttggccaaaagcacaaaaaaggcgttttcggaagcgacccgaccgtgcacaagggccatttgtttgttttgggactcggggcaggaaatcttgcccggcctgagtcacggcggctccttcaaggaaacgtcagtgctcgccggtcgctctcgtctgccgcgcgccccgccgcccgctgcccatgggggagatgcagggcgcgctggccagagcccggctcgagtccctgctgcggccccgccacaaaaagagggccgaggcgcagaaaaggagcgagtccttcctgctgagcggactgggtaagcgccgccgccggccccgctgggggcttggctcacttccccagagcggcttggaggcaggggccggctttcgtcggagttctcggggccggggtcccggcggcgggaacgggaggacctggcgggcgaggtcgcgcgcgcaggcctgcgccccagggataaaccccggagggtggcgcgcaccgccggctcgggttggggaggagggtgggagtccggccgcaggacggcgcctggccggggagagggtatctgcagggacagtgagcgaagccaccgtggccgccgcgcacccgccgggaagcgcttcggcgctgcgaacccggctttctccggcggcggaataaatgagagaggtggaaaactaccccgggctctccggccctccccgcgccctccgccggcgcgttctctctctcctgccccaggagccgatggagactgataacggccctgcgccaggccgtccccgggcggtcctcgcgcccccgcccggggctcgccctctcaatggggacagaaccgcccgccgcaggcagcgtagccgccagcaaaccgcgaggcggccggggcggggcgaggggcgaggcgaagggcggggccacttctcactgtcgcgcaggccccgcccccgcggcggtgccttttttataaggccgagcgcgcggcctggcgcagcatacgccgagccggtctttgagcgctaacgtctttctgtctccccgcggtggtgatgacggtgaaaactgaggctgctaagggcaccctcacttactccaggatgaggggcatggtggcaattctcatcggtgagtgcaggaatcttgcgggacttctgctccaggagacgcaaagtggaaattttttgaaagtcccggatcagattagtgtgtgtggcgccggacgttatgaagccgtctaaacg

SEQ ID NO: 12995 - DNA, 1471 bp, Homo sapiens
gaacttgctggaacttctcgtgtttgtgggagctgaggtaggtaggtgaaagacctgtcgggtcacgcgccgctaccggaagcgtctcagcaggaggttcctacggcgcacgcccagcttttttttgccacaaattcttcgtaagatgcaaatcatatgcaaaatagctgcaatgcaggagctctcgttgaatgcaaaataaacacattttactcctacacaggcgcctaacaccgtcgtcctctgtatcccactttcggttaaggggcagaaataccgccctatctgtaaattaggcccatggaagccgagccgcacctcattcctatatgcaaattagctgctccagtgccgaaagctccgccccatttgtagttgcgtcggctgtccagcacccagtgcaaacgaggcgtgggtcccggaagctctgttctgcgggtggccgctcgcgcctgcgcagtggaggcggcccaggcccgccttccgcagggtgtcgccgctgtgccgctagcggtgccccgcctgctgcggtggcaccagccaggaggcggagtggaagtggccgtggggcgggtatgggactagctggcgtgtgcgccctgagacgctcagcgggctatatactcgtcggtggggccggcggtcagtctgcggcagcggcagcaagacggtacagtgaaggagagtgggcgtctggcggggtccgcagtttcagcagagccgctgcagccatggccccaatcaaggtgaccgctggcccggccgggcctgacatcccccactacccccatggcaatccccgtcccgctagtctgagagtatcgctttatttcctgcctgccagacccctcccctccgcccgcccggctcatcccttcagaaggccctcgtggctgcccacctttctcgccaatcgtgggggcctcacctcccgggacagtcccgaggcattgtgttttttgttttttgtttttttttgagacggagtctttctgtgtcgcccaggctggagtgcagtgacgcaatctctgctcactgcagcctccgcctcccgggttcaagcgattctactgcctcagcctcctgagtagctgggactacagatgcgagccaccacgcccagctattgtatttttagtagagacgggatttcaccccgttgttcagattggtctcgaactcctgacctcaggtgaaccccccccgcccccccccgcctcggcttcccgaagtgctaggattacaggtgtgagacaccactcccggcctgatttcccctatcttctgaaacagctgtcccttagcgcccccgcgggggcttaccccatcccactccatgacctcccctccccccatggcgaattcccacctttctgtctttcactcacttcctggaaccgtccccagggccttggaccttcccccttctcctcccaaaccttgtgagaccccattccctttctacttcatc

SEQ ID NO: 12996 - DNA, 1470 bp, Homo sapiens
tgtagtccaagctacttgggaggctcaggtgggaggattgcttgagcccaggaggttgaggttgtggtgagctgtgatcatgccactgcactccagcctgggcaatagagtgagaccgtctccaaaaaaaaaaaaagaagaagaaaaagaagctctgaggctccaagtccccaggcaccccttggcttgagggcagacaagggaggagagggtcacctgggcagccctgacttttgtcccctggcaaagggaccttcagtgaccttggccctaggagagcctctgagcacgtcagccatgtcgaaccgctcaggaagggcagcaagaatttggcttctgacctctgcctctcctactcgccatctgcactgggtgtggttgtgcccattttacagatgaggaggctggggcatcgaccagctgaatgccttgtcccaggtactgcgtaggcagagctggcagttgaaccccgtgtcctggttgtcgctgggggtgggctgcaccctgacttgtgaggccagtagcaaggtttgcacgtgacttcgtgaccgtcacccagctctgcagcacatcccgtgacccagctcatccaggccgcatgcaaacctgttgccaggcgagaaaccagtcaccgcacagctgtggttgcctgaaatgattaagctcattaatcaccccggagtgaggacagactcagatgaaaaccagcaaaagccctggaaactcatgtgaccctgccaatgagggcggccatgtgcattgcagcctggccgtcactcctcggtacgtgttttggacttaaacgctccggatgtttactgagtgcttgattaataacatggaaggcctggtctcattgctgtgggagtgaaggatgcacagccaggcctgacatgatgagaacaagaacctggagtctcgctgcctgggtggtaatcctggccctgccacttagcaactgtgtgactgtagccaggtcacttaattttgctagatcctgcctgcgcttcagtggatcttgctggttttccaaggtggccaaacactttaaggcattcatgtggtcgctaggctgcagggttgaaccctggctcaccccgcagggcgccgtgtgctctgtggcctggctgtgcctttgctgacaccgtgcccgtgtgtgttcatgcaggtcaggagcgggtcgtgattgccgacgatctcccgcacccgttcggtctgacgcagtacagcgattatatctactggacagactggaatctgcacagcattgagcgggccgacaagactagcggccggaaccgcaccctcatccagggccacctggacttcgtgatggacatcctggtgttccactcctcccgccaggatggcctcaatgactgtatgcacaacaacgggcagtgtgggcagctgtgccttgccatccccggcggccaccgctgcggctgcgcctcacactacaccctggac

SEQ ID NO: 12997 - DNA, 1468 bp, Homo sapiens
ttaagcggctcagataactcctgcgaccccaccccacccccaggcccgctcgccatggccctcttcggggccctcttcctagcgctgctggcaggcgcacatgcagagttcccaggctgcaagatccgcgtcacctccaaggcgctggagctgggtaaggcgcaggggcagacagggacggacgggagcggacggggttggggtcgccccaacagtgggcacgggagctaagtaagggtttctctgctgcttcagtgaagcaggaggggctgcgctttctggagcaagagctggagactatcaccattccggacctgcggggcaaagaaggccacttctactacaacatctctgagtaagtggggggcggggcctcgcgatccggggcggggcctcggcggtggaggcggggcccgagaaatctcagggtctcgggagactggaggctgagtgggatggggcgtggccaaatcgatgaggcaagacttaagaaaccggatggggccgaaaagataaaggccaagccagtcatcataggcgggaccaggcagatgggcgtggccttgaaaatgtagagggggccaagaaggaagcaggaccagtggatgtgaggcgtggtcgaagaacaacagaaaggtggagtcaaggaacttcccaatagatgagagtggagtctcgggcacggggtggagttaatcggaggggtggagaaactgaaggctctaagtatggtttaggatgagggagggggaataaggaattgagatgtgagacggagcttaggtgatggaggcaaagtgaacggactctattaaaagaccgggtgtagcaaccccagggtgtgggaggggagggggtgcaagcaaacaagactttttttttttttttttctgagagggagtcttgttctgttgcccaggctagagtgcagtggcgcgatcttggctcactgcaacctccgcatcccgagttcaagcgattttcctgcctcagcctcccgagtagctaggactacaggcgcgtgccaccacggtctgctaagttttgtatttttggtagagacgggtttcactatgttggccagactggtctcgaactcctgacctcaagtgatccgccctcctcggcctcctaaagtgctgggattacaggcatgagccaccaccgcacctggcaaacaaacaaacaagacttttaagcgatggggtgaagctcatttttaacacctggatcaggaagacctcctctctcagccacccaagttcaactttgagccacccaagtctaagttgggcacttgagggacaatggaagaattcattccacccactcccgcttccccaggcctggacttgaaaggggagcagacaaatttcctgtcgttgggggaagttccctcttcttggccctggatctgaccctgaggcctcctgtagggtgaaggtcacagagctgcaactgacatctt

SEQ ID NO: 12998 - DNA, 1467 bp, Homo sapiens
gctcatacctatactcccagccctttgagaagacaaggtgggaagattgcttgagactgggagttcgagggcagcctggacaacatagtgagattccatctctacaaaaagtaaaaaaaaaaaaaaaaacatagctgggcatggtgttgtgcacctacaatctcagctacttgggaggctgaggtgggaggacagcttaagcccagaagttcaaggctgcagtgagctatgatagtgccactgcacttcagcctgggcaacagagcaagaccctgtcgtttaaaaaaaaaaatgaggacaaaaattggaagttgaagatattttggccattaatttaatcgtttatttaacctgggagaaaaactgccactgttttattttagagcaatgcttccacatggcaacacgttcaattgcgtttttcccaaaccatgttactttccaaacgattacaagtagtcgcgaagggtggtcacactttacaaaaagtgtaattaaattatagagtcggctacatctcagtcactggcccattcctggtcaactgacaagtagctgtggtggcttctagtagcttgttacaagtcatcaagtcagtatgagtgttgggggatggaagctattgaaaacggtgctgacggcccaaggagtagcaaactgtctcatgaaccgtcctgagccgactcagtaaggactcaatagagaaggacacttcatttacttccctgacaactgcaataaagaggttttagagctcgctgagggatgctgcctgggcaagggaaataaatgtgttgtaacatgaaacggtcccaatcaagcaagtcggggccctctcgctgtcgccgacagtccagagcaaggaagtacacagcagtcctgaacctcagttttctgcaaaccagaggcttgccactgagcctatgtgacccgaaagctgcagaaaggagaggctgtgcccggcacacggaggccgcctcgccagcctgtgctcccgaccctgcgcctgccgccccggactcacctggcccggggccctgcgggtccttcagctgagccttgaaccgcacgcccgtgagctcttctttgcgggcgcgcttggctgcacccgcggaggaagccgcgccgtcctggccgcccgaggccttcctcttggggacccccatggccgagagggcggaagcgcgacggaaacgacacacctgaggggacccggcaggagcactggcacagacagcagacacgcgcttcaggcccacatggcgcaggaagaggcggggctggcggaagaggcggggctggcggaagaggcggggctcggggaaaggccggcggaaggggccgacccgcgcgaggctgggaccggcggaaggggcgtggcctgcagaaggggcggggcgatagggatccagagtcttggggatccagagtcttggggctccatgtgagtttgctgtaccggttgtc

SEQ ID NO: 12999 - DNA, 1466 bp, Homo sapiens
ggactcttttgtccattgtgtgacaaatgtgagggcctggttcagggtgtggggagaagcattccagggcattgccatcttcaaggcagaaaggccatttcagcttctgtattcacttctgttatcctactgaatattttggatcaggaaattccaactgcagatgtatgttttagtagtagttgtctgaccttggacccatggggtgtacagaagtggagagaggctgaatggaaggaggccagccaggaggctatggcaggaatttagaccagagggcctggcttgggttgttggggctagaggttgcagacaggaagggttggcttaggataaacatttcttgcatcttgaaaggagtgatcaaccggatgcggtggctccttgaatgattgatgaaacacaggggtgagtcagtgaattttggaagaacatatttttagattacagtttgcagtaaacactgggcttcagagacgtgaggcaaaagagatacatggagttgccaccgagctgggaatagtcactatgcaaacagcaaagaagatgagatgtggctatcatctgggctgctagttcctgtttccatgacctagacctaacactgacatttgtgaactccgtgtgtttagttttttattcattgcttccttccttttcaaaatgcttattggtgccaaatgactcatccagcaaagtccaaactctgaaatattaataggtggagagaggagagatgccaaagggagtgagtctgacattacacataccagcacacagcctgtggttttggatcctggagtacctgtctggtacctggtacccggcacactgtgagttcctggacatcaagggctggtaggtcattcacctgtgcatttctagcatccccccagtccagtgctcagcgtttagggtgtgttaagtgcagagtttcttgaatttgaatgtgtcccaacagcaactgaattttagggcaatcattttgagtacaaacgactttacttttccatgtgaatatttaataataacagaaacagttagtaatgctatatgacaaattgttttacagttgttcatgatgttttcataccaggtgactatcacatcctttgagtttctttggtattgtgtccaattaagtaagggcttttaggctggtggaccagaagaccagagctcagtctgatctgcatcagaattgaggagctcttattgtcctgagccctggacctccagcccaagttcccagagctcatgatgaggctctggtaattataaagtgttgtttgcaaatgtatgtggctttgaagctggatacggtggctcacgtctataatcccagcactttgggaggctgaagtgggcagatcacttgaagtcaggagtcgaagtcagaagaccagcctgtccaacatgctgaaaccctatctctattaaaaatacaaaaattagccaggcgtgat

SEQ ID NO: 13000 - DNA, 1466 bp, Homo sapiens
ctttgaaaatctagtcatggccgggtgtggtggctcatgcctgtaatcccagcactttgggaggccgaggcgggcggacagcgaggtcaggagttcgagaccagcctggccaacacggcgaaaccccgtctctactaaaaatagctgggcgtggtggcgggtgcctgtaatcccagctactcgggaggctgaggcaggagaatcgcttgaacccgggaggcggaggttgcagtgagccgacatcgtgccattgcactccagcctgggcgacaagagcaagactccatctcaaaaaaaaaaaaaaaaaaattaaaaaaaaaagaaaagctagtctttcagtacagggatctggagattttaatttgcgagctgtttaactgctaaaataaaaaaaaaatggcggtttccgcaggggagccgaaagctaccggccggcaggtttaatatccagcggcgcgaggcctgagacagctcagatcaaagggaagactgcgctgaaagaaatctcgcgaggccgacgcattgaccaatattcgcgagatttcgatgccctgtcctcttcctctctctggcaggaccacggtttatctcgcgaattttgggaagttccgttggggaagatggcggcggcctcgagcacccttctcttcttgccgccggggacttcagattgatccttcccgggaagagtagggactgctggtgccctgcgtcccgggatcccgagccaacttgtttcctccgttagtggtggggaagggcttatccttttgtggcggatctagcttctcctcgccttcaggatgaaagctcagggggaaaccgagggtaagtgactgtaggggaaaggagggggcgggacacaactgggggagccagtttgtgagaggaggttcttgcagatgtcccatgggggccactttaggggcatagagtccaggagagggaatgtgtattagttttagattgtcactataccctccttggtgattatagagcttcgactttagggcgatggggactctcaacttctgtgaagatttcatgctcgactagggcacttttggcctaaagtggtgggagacggggcaaatgaatacaaaatcagcttacatctcgttccagaagagacgcctgaataaatttagggctgtgtgtaaacgtactggagactattttggcatcaatgaaatgattaggtccttatatttattagcagccagcagttctctacaatgtcaagtgttcagatcctgtgccattgtgtatttttaaagtgcgctgaatttcgttcttttattgaccgaactacgaactgcagaaaaacaacttttctgtggaactttactaagattttctaaagttccacactccggctaagatgctgccttagcattttgggcatagttctgttgatacagtgaactgtgttattgtttatcttctccagtttcctctgagctttg

SEQ ID NO: 13001 - DNA, 1465 bp, Homo sapiens
taatgcttgatgcagaatcgaaacttctcatttatctgtatattatgtttacttctaaggatatagcacaaagggaacattttttgtttaaagtgaactacagctgtgctgtgaagagagttctttataaagcctgtaggttcttttaactttggtttaaaatgtaagataggaaaatgttggatatttgaggccatgcttaatatatttatattgcagtatcctttaaaagcaaaaaaaaaaaaatgcatttatattacagttttcctctatgaaagtccttacttatatgatacaagcactgtgttttgtgcttaaactcttcagcggggtagcatcaaagttcttggggaaggatcgtatatgtgggtcccttccctagaagaatggttgctgatatggctactgcttctacatcttgagttttttaatttactttttttacactgtagcattgagactgcttgattcaagtctggtgctttgccagatgtattaatttccataaatgctttgtgagtttggttaaaatgaagattcacttgggaaaacactgcagctttagtctgtgttactatcttgttatgagtatgtaaaagtaaaatgcatgtgaatttatcatatttgcactatgaaggtatttggttaaaatacaaagacttttaagattttaaggccctttcttccaacagcttttatagttagcagccattctttattttctggatagccaggttttatcacgcttctagtcaggatgctcctattccttctaaaaattacggtctgactagtgagcaaagtcttgaatttattcaaaagtcctaaataccttctctaggtaagacacttggtagatgagagacggaaggcattgtcaagaaccattttcatgagaggtggtgtgcaaaaaggtagaataaaagagttctttcaacaaagatttactgtctattctgtactagaccctgtaggttttggggtacagtgttaaacatgatagaggctctgccgtcttggactttaatagcttagagaagagagcaaatgagctgacaggtggttataatgtgaattagtgctgtggtttaggaattggagagaactcaaaggagaggtatttggtgtaatggtaggctttctggagaaaatgatatttaagccaagaactcttagaagttagctaagagagagatgggaaaatgagacgacattgctggagtagataaaactgcatgttaaaggcaggaagatggggaaaaaaagttcagtaaagctggaatggggaaatgtagtcagggactgaattttaaagggctttatcaacctcagtaaagagtttggaccttatgttgagggtggctgaaaacatattcatagtgtcatgaacaaattttatcttcagtcacttgggctgatatatagagaatggatttagagagatgagaccaggtgcagtccatat

SEQ ID NO: 13002 - DNA, 1462 bp, Homo sapiens
ctttgttgtctcagcactcccttcacagtttacaagaggctttgggggagggctttaccccccgggataatgggaggcgtggagccacggtttgctgcggtctttgctctctgggcagtgaggccttctgttgtttaccttaggctgcctctgaagctcccagatccctgcctagacatgatctcactctctcaaatcatccctgcgaggcagacaggagtctgggtccaacttcccccacttcacaggtgggaaaactgagggattcacacatgtgtgtgccgcaagacacacacacacacacacacacacacacacacacacacacacacagagcaaatatgttgacaagttgctctgcagtcctggggtcctgtgcctgcagttatttggaaggtgagaggtccatgatagggcctggcccagcggcgttcagcaagtgcctcaaaattcatgggccttctagtgatatcccacagcctaacacagggccctgcctccagggagcctgtggtcagtatcagcaggtgagaggagcctaaagagatgcatcctgcgttgctgaagttcctgagtccagttctaaggcagctctacaggcacatttcgccaggcatggtggctcatgcctgcaaccacagcactttggaaggccaaggtgggaggatcactgaggccaggagttcaagaccagcctgggcaatacagcaagaccctcgtttctacaaagaattaaaaattaaaaatttagccaggcgtggtggtgcacacctgcagtcccagctactcaggagtctgaggcaggaggatgactcgaatccaagagatcaagtctgcagtaggagctgtgatcacgccactgcacctccaatctgagcaacacagtgaaaccctgactctaggggataacaaaagtcacatttcatgagggcaggccttgcgtgtggtagcaagagctatggtggagagggaccacccctgagggttggtgggctgcctggggacggtgcccagtgctggacaatccacacagctcctctccaattgttgtggcttcccaacacccctgtaaaagaagaattgctatgatcctgctctacaaataagaaaattgaggcccacagctcacccaggagcacagagcaagccagtcagcagtggctggccatctggctgcaggtcctgagctttgtccacaccaccaagccacagtctccctagcagggaggcgcacaaaactatcagaggcagaggaaaggggtggcctctgccaggtgaggagccagacggcctgcttcgcagatcccttccagctggctttgccttccagtgctgaggtggggtgaaggaggaaaggccgagctgggagaggagcaggcgctcgccacaaccacccccaccctgctctccacgcgccaggtcctgcacgctgggtgggagggtgacgacaaggatggaggag

SEQ ID NO: 13003 - DNA, 1461 bp, Homo sapiens
attgtcagcatgtctgtctccctggcaagttggagggcagaaatggcctttgctcagctctgaacccccagtgcctagaacagtgtctggcatatggcaggtgctcaataactggttatggaaggagtatagctgggtaatatggtatccccatatgaacagaaaataaaacccagtagaggcttaggtccaagggaggggcaggaagagagtttcattagtctccaaatgtcctgagtctagcacactgcctggaatatactaaatgccctcataagtgccctttggagtgagtatggagggtgctccagatacgaggcttccatgggcctagaggatggactcaggaggtttgagactgcatttggattgcggccagaactcagggccccatcccaagaagtttgaggcccagccagaccaccatgagagcctgcagaggactggggttcagggtactgggggcctcttttaggagtgcaggctgttcctgtggactctgccagggctcaaagctgcggactggggggtgggctggatcagagtgaacaggagcgggcaggctggagttgggacacattctccagcctcttctgtttgcaggtgcctgaggacaccttcaaaccttctctgctccgttgtagaactttttccagcaagggggagaggaaggacaaaaggctatgccttgggctccaaagtttaggagaggagccatggagatggacagagagaggtgaggagagagagacccaggaggcctctgggaagggaagggaaggttgctgaggaaggaagtctgcacttggggccagccctgcctctggcaccagccccactgggccagggtcccagggatttattgactaatcctcaaatgatacactttccctgatttattctctctcccgcttgcaatctcacaagatcccattgtctctggacactgctggccaagggcctccacctcaggagctgctgcctctcatccacttccggggcgagggtaatggaagctccctaccgccaagcaccacgaccctcccctgccttctccaggcctaagggtcaagctgccaggccaccaggcagtgccaggtacgaggatgacaacacctagccaacccgcggagaaggcggtgagctgggtgacctcctggagctgcaagagtttgtgcctgctgaggccttgctccaccgagtcttggggggaggcagctggcgggtgggggcgtggctgccaaggaagtgggtgtcgggtactgggcgggggacagagctaggtcacagtcgaggttttcactgacccgagtgggcgggggtaaagggaattcgtaaaaagtttctttcttcattaatggccttttttccctatccgagagcctgggcgcgggagggagcgaagacggccgggggcagggcaggccctccgcaagtgacacttaattcccggtctggact

SEQ ID NO: 13004 - DNA, 1461 bp, Homo sapiens
ctgcagctcctgactcagcttcccccatcaaacaggggctcgtcctgccccacccgggtgggagacccaaccttccaggcccacaggagctcgtgcgtgcgtctcacgttccagtcacccgggtagcaggcgtgcgtgggcaggggcagagcttggtggcgatccgtgtcccgacaccctcaggctcccgaatgggacttttcaggggtgagggggccaaagaaggggaggcaggggctgcgtcactcgtgaaggggcatcgggaccccagcccacttgtggtcccacgtctgaaatccaccggacagggagattggtccaggctcacacccgctgggatggcaggaggcaggggtggcacgtggacagatgtgggtcccaaaatccgggcaggggggaaggtggagggtgtggtccgtgccagctgtacccaggcaggtagggctggctgggtggggagggggtggggctgggaggagttcctgggtctggggagaggccactgctcaggagcaatcatctctcagggacccaggctgcccgccgctgtgaggaggcggcagcagaggccaggaggccgggggccgagcttcaggcccaccccgccttggcccccccctcaggcccagagacctgcagccaacctgcctgacaggctgagcgccaccagggaggtgagctgcgtgggtgtgggagtgcgagagtgtgtgtgtgggggaagggggtgcataccagaggggtatggtgtccaggctgagcccctgcacttcaatggggtggggggctcctcgaaaaaaaaaacataccttgaaattcggagaatcacagtccgccaacccctaagcctcaccgccacctcagaggctgggccccaggacggcacctggacaccaaacagggtctccagccagcctggcaagtccaggccagacgagcaccccccatcctggctccagatgaaagggtgcccccgacccgtacacgcccagggctggcagctccctcaggtgaaggcaagtataggcaggccctgggtgactttctggggatgggggcaacagagggaccagggacaggagcagggaggtgggggcttggccccggaggacaggacgggagacctatgggaggaagagagcagatccttgggacggccccaccctgggatctggggctgatgggctcaggcagaacagaattgctcgagagtcagaagctgaggcaagcgcccccctatgacctgccaggtcgccaggtcagctgagacagtggagctgagtcccagggcctggccaggctggctctcccatgcagcagcctacgtccctagaagggcagatgacagggaggccaacctgaggccctggcccggcctccctgacctgccgcatagctcttgccggtggagacaggcccaggctggcataggctctgcctgaggtcacagacacctcacacagc

SEQ ID NO: 13005 - DNA, 1461 bp, Homo sapiens
tggacctgaaggaatacctcaaagagaaaaccacatttcaaaatgtttaagttattatctatagaacagttaagatgaactttaatcttgtaacaatgtctgcataattctaagacaatagccaaaaaactattaggaagtgagtcagagagcaagctaatgtaataattaatactgaatgtactacaggcttggtttactttttttttttttttcccctccctttgtccttcattaattcaacaaagtctataggaatagtttcatcttgaaactctctaaatcatacatgatggttgtaagaatcaacacgtaaatgctatatcataaatgaacctttaaaatattatgctaagtaaaataagccagccataaaatatcacatattgtgtgattccatgtatttaaaaaatgtccagaataggcaaatctatagagacagaaattcaagtagcagttgcccaggataggacaaatgcagaaagaaggggtagggagtaaaaggctaaagcttatagggtttatttttaggagataagagttctctaaaattgactcttacggtagaagcacaattctgtgaatatactatgaaacattaaattttacacaataattgataatttgtatgatatctgaattatacgtcaacaaatttacaaaagtttttgaaccacatttagctattttatctttagttctgtgtcaaagagactgcaggaacatgagcctctcactgctactcttatgcacactattctgaaatatattacatgagtcaggtgatgagtccatccaagatcattgatattagctgaattacagcacttaaaaatctagggctgggtgcggtggctcacgcctgtaatcccagcactttgggaggccaaggagggcagatcacaaggtcaggggttcgagaccatcctgccgaatacagtgaaaccccatctctactaaaaatacagaaaaattagctgggtgcggtggcaggtgcctgtctgtagtcccagctactcaggaggctgaggcaggagagtggtgtgaacctgggaggaggagcttgcagtgagctctcaaaaaaaaaaaaatccaaaaagaacattaaacgcacttgtgtaaacaggtcatctaccttttatttgtctctttgtcatccacatgctcagactgttaatataatgtatttactttgaagtgtaaaagttacattttaacttcttgactgatttatactggatgtcaccatgagaaatgacagaaaggagcagcaactggaaaacaagcattgcattgcatcaggatgtctatgaaatggacttcagctcttctgctgatacagctgagctgttactttagctctgggagttgtggaaaggtgctggtgtggcccacagaattcagccactggatgaatataaagacaatcctggatgaacttgtccagagaggtcatgaggt

SEQ ID NO: 13006 - DNA, 1460 bp, Homo sapiens
gaaactccaggtttccaactcctgcacaaatcctttctaatatccatccactcaggtgagctggcagggcagtagctgtgcagggttcagggtcattatatgtcaatgaccttcagcacggattactaacaacagtaacatccgttaccgtttactgctttcctattaagcaccatgcactgtgcataacatgttatctttatctcatatctagaattttgggaggtactttgaatcattacgatctatctacttcttaggtgaggaaatagaggtttaaaatttagtccacagtctcgcaaggatggagcctggatcaaattttgggttatcagattccaatcacgtttcttagcttttcttttttttttccaactccagtttctgtcttgctccaaaaaaggggaaggagcggctgcggcgctcggtttcccgcctcctagggaagggaagggagacgagcagcgcggaggctggggcccccttccgggcggggcctactagtgggcggggcctgtcagtgagcggcccctgcccggaaggagccagtccggggcggagccgatggccttacaggggccggaagtggcctgcgggcggagaagtgcctcaggagtcctgacgcagtgtcttgggcgctaacggcggcggcggccttgtgtttagactccagaactccccacttgccgcgttctcgccgccgcaggctcccgggacgatggtgccccgcctgctgctgcgcgcctggccccggggccccgcggttggtccgggagcccccagtcggcccctcagcgccggctccgggcccggccagtacctgcagcgcagcatcgtgcccaccatgcactaccaggacagcctgcccaggtgagcctggcctccgggtccccgccgcccgccgccgtcccaggatcggccccaacctgactgcagtcactcatgactcctctagtgaacccgtttccgcccccaagcccctaccatggaggctgccacagcccctaatctggaagtcttgggacttttcacaatctcctagcacaggaacctcagaaccctcaaattctcttccagaacccctcgatgctatctcagattctccatcttgaacgcttctcagattccctctcctttaacctaacttccagccagctatcctgagtcctcttctccctgaaaaatgccagacctgcatatttccagcgccgctgtaatccctcgactatggtgtctcctgaagtactttaatgactgcctcacattcctacccggaatatgggtaggctgattcctaatacatcatggttaccattccttaacttctcccagcaccgccttcacccctgtcactcaggaccctcagccccacctcccatttctccagtactctgttctttcaccccccatgagcccccacaagcacagccctgaagtgttcacccttgtcctcaactgac

SEQ ID NO: 13007 - DNA, 1459 bp, Homo sapiens
acaaagacaatgtcccagccttaactttgcaaccaccttgcctccttctggggttcagcaggggggagggggaacagcagcagcagcctcagcatctcctccagcttctccttctgctcttctcgagctcttggataattcttcctcttttttcccctagcctttttcctcatttctttctttctttctttttttccttcctctctgctgcacgttgttgttgttattagaaaggcttcgcgcaccccctggtgctccggcgttttgtgtggcaggagaagattgtcttccttctctctttctgtcttgctttctctctccccctggttgctcattattcagagagagacacagagggagggagagagagagagcgcgcgagggagagggaggagaggagagagaagaggagagagaggggagagagagagtgagagggagagggagggagggagagagagagagagggagagagacggatatctcaggtcatctgcagctgcagcgagtctgaggagccgaggaaggcagggaagatggcgatcctccattgctgagacccggcagaagcacatgagactcccaaacaacttccacaacaataacccgagcaggaagaggagaaagagaaagaggataaggaggcggtggggctggagaacccgaagcacctcccggcgccgggacgcttcttctgtaagttactgcaattaacaaccacctcggggtggtccgagtgctccggggaagagagcgcggggtggtggaggcacaaacgcgctcattcattcggccaaggagggttggaggagcggggaggagaggaagtcccctgcatggactggctgttggaagaggagaagaagcgagagagaagaggaggagggggaggagggagagcaggagggggaggaggaagaggaggaggagaagcgagggaggaagaggaggaggaggaagaggaggagaaggtggtagtggtggcagtggaggtggctgtgcttttcctgctggctgctgctcctgctggggggagtgagcgcggtggcttaattaatttcgtgtagttctatgaagagaagagaaaatgaaagatgagtgagaagagagctggaggcttaggacggatgctccgagtgtggggacaggagtagggacagaggggggcggagggcgggaggccggagacctgagccgagagccagagggagcgagcgagggtcagaggagggagagctccgtgcgagcggccccgacctgagcgggttgacctctttctttctctgtccctctccttcctttcccccttctgtctgcctgtcccccgcccgatggcaaagccgtgcggattggcagcccccctcttcctcaggtatttggctctctctctctctctctctctctctctctctctctctctctctctctctctctctctctctctctctctccctctccc

SEQ ID NO: 13008 - DNA, 1459 bp, Homo sapiens
ctttgtaattgccaaaggacaggggtcccatttctcccaatttccttgaaggcctcaaggttaagctctcctgaagtgcaggaggggagcagagtgaaatcttagcctcttgatgacccctgtgaaatgggacggggagcaggggccattcccggggaactaaggacaggcctgggccccagggcttataaggcttgctcaaagcctgtttttttgttgtttgcattacatttttagaaacagatttttcctcgttgattgacttttttcctctggtgaccatattcccttccctccctcccacctccccaaccttcatccctcttctccagaattcagcctttcccaccactcctggtggctgatgtgtgactttttcagggaacagctgcagctcgaaaagttgcccgagacacagtgtttcagggttgctgggtgcccgtgaggatggttatgggtgtttttctcacctaggagacgcggtggggtaggggggccaggacagctgcatggttggaggagagatgccatcttttggcaagggggtgcaggaaggcagtcttcctagagctggggctgccccctgccagctggggtgagggggtgtctttcatctctcccagacgcagggctcccactggggtctggctgcccagagtcccatccttccctctgtggccggccttgtgcctcctttgcttggtctccctgacttggaacacttttgaccacaaaaaccctgattttatccctgttggaaaccctctctgattttttttttttttgaaacacggtctctctctctgtcacccaggctggagtgcagtggagccatcatagctcactgcagccttgaacgcttgggctcaagtaatcctcccatctcaccctcctgaatagccgggactacaggtgtgcaccaccatgcctagctaatttttccttttgtgtagagaaagggtctctatgttgctcaagctggtctcaagctcctggcctcaagtggtcctctcatctcagccacccaaagcactgggattatataggttttcatatactgtgcccagcctctgatttaaaaaacagtggagatgagttggcctgtattttctctgtggacctgctgtatggggctgtgggttggcctgcacttttctgcaggtggcctgtctaagctgacttccacctgggacctgtgtgtgtttgagcctgtgctttggttgtgcaattctgagcctgccccaccctcctagctccttcctgaaagtgaaatgctacagtctttgctcaagaacaaaggactcaagctcagccctgcatgttaataattttcaagtgtggccacttcctcttgcctggcctgactcaccctggctgctgcccattgtggctgccatggaaatacaactcgaggagaacccagaccaggacagggaggccatgttctgggtggcagtgg

SEQ ID NO: 13009 - DNA, 1459 bp, Homo sapiens
acctggagctaacgtgtgtttgtgcgtgtatgtgttcacacgcacacacacgcacccacatgcacaataaggggggctgggggacctggttttctgtccccccattgccaagagtcagggcaatgccaggtgctgggctgggttctggctgggaattccccacaggcttccccccaatgccccgggggtggctgaggccaggcctcccagcccctgtggcctgagagctgtggccttgcaggcaggggccctccagcttcaggtcagtggggctccagcccctcttgagctcagggcctggttgggggatggtgggatgggctgtgcgaagcttctggaaacccctgcagaagaggagaccacagtccacccagcaggggaacccccactccttgtgtgccccaggcccggggcctggggagcactttgaaccaggatgctgtgggatgggggactggcagctcaggacaggctgattctatctaagcctggtttggggccccagccaaaatgggactgtgttttacttcctgtcctggcgaccatccaccccttgggctctttcccagtgggtctcaggtcccagttctccctgaaatgctattcgaggacagaggaagggtccttcacagacctcggtccccaccctctactctggttcctgccaaccacaaagcaaactcggggagctcagtgctccccaggcagggtggcccaggggaagaagaaagtaggtggcggtggctggtcccccagcactagaagggagtggctgggactccaagcgtgctggtggtgcacgagggggactgctggagccagcactggagaactgcaagagggagccatggcaggttctagagcgagggcatgaaccaagggagtcggggtatactaggcctgggttgacaggccaagggagttgccctgtgtggggccaggcggtaggacacggcccagggcctcgcaggtcccacgggccccgcgagcctcaggcggcaaaaacaggccagctccgggcgcgccgcagggtcgctgcctaggttccgcaccgagacccccgtgcgccgcactgcgcaggcgtgcgctagccgtttcggacacgccccaccgccggagcgcgcagccgcactgggttcccggagagcgccctcttctggctccgcccacgtcgtgcgcagggggtgaggccgggcggagcctgcgtcgggggcggggccagagcaggtccgggcctataaaggtggcggcggcggcgacgcgcccggctcctctcagcggcggtggcccaggtagaggggtccgcgctggcggcggcggcggcgctgttccccgcgcggtccgcggagcggggtccgggctgcgcgacgtggggcggcggcggcactgcggccccggcccaagcccgaccccggtgagtgcgaaccccagggcggccccgaggacaccgacccggtag

SEQ ID NO: 13010 - DNA, 1456 bp, Homo sapiens
cgtgattccttgatacttttgggatcaagcctgaccctttgatgtggtctccaagcctaggtcagcctgaccatcatcctcttaccgcctgacattgctgcaggtgggtggaaggcctcggctcctctcaactccaagcttcttttccttttaggtattggaaccacattcttccacccacctggggcactttctcaagcaaaactctcagccgccttcaattttgagcttaaactttacttcttttcttcctccccctagagttcctcacacatgagccccttgaactctgagtttgggatcctaaaacttcttaagctttattgttaccccttacctaaccagaatctaagttccatgaaggagggacctcatccatactccccatgccagtgaatacatttcgagtaaaccccaaaagtatttgccaatgataaggtaaaagcagtgggtttcacaaaggacaataccatttgcagaagaagcaccacatagcaataaaaacccaaatggttatccagattatgtaagggccacaatcatgggcaaggtccctatcatgtgtaagagacaatgtgagttattttgtctatatgaaatatgccttttgtttggtagttgtcattttttcaaagaactttttgctaggctatcgaaaaggtgaacgactcaggagaatgggcattatagttgacggttatttagcaactacagtgtgccaggtccaacaaccttatgaagtaggtgcaattattactgccatttggtgaataaggaaactgagatgcctaggaaattaagtaatttgcccagtgctatacagctgatcggttgaaatcgtatctgaagccaggcactgccattcccaggcaggcacccattgtactgtctccctgtggaactgcagatcaccttccaatattgagggtcttccacatttgccggaaaataccatgggctgaagatgtgcaacaggctttacctccctctctcaagaggtggagctggttcatgcctcagaacataaaagggtggggtttgatttctcatctttgtgaattatttctgaagagtttattgtataatcagtgactaagtaattgtggccacgaggagatacaaagatgtttcattatggatggtgtaatatttaacttcacggaaaggacccggggctctgtggcttcccatccgtcttgtgacccggaatcatggtgatctaaaagagccctgtgactctgggaaatttgttatcaaaggatgttagccacaagtcctgttggcaaatggaccccaggtggcctgcagtgccaagctgtttccctgccagcctcccagtctggccctgactctccaatgtaagtgaggggcacaatggaaatgttattttaggcctttccactttaattgcatttcctacaagagcgtctgcgggtttttcttcattttgctggtg

SEQ ID NO: 13011 - DNA, 1455 bp, Homo sapiens
cagtggtcctgctctccctactaaatggtggttcaggaggccagggggcggggcggtaccggcggcagaggcccacggacgagctcgcaggagctcatcacacagctgaccgtcacctgcccacctcaccacacctgctaggtgccaaaccccttgtaatggacagggaagggctcaatcacgggtccctactcttagcagcgaacctatctcagcgcacggcctcctgggagatgtagtccagaccgcttcccgggaaccccccccccctccccccccgccccgccacaaccaggcatccctggtcccctcacaacttccccaggagagattgctcggcctggccagctgaagctggagttgctctccaagtgtcggggccaggcggcactccgcggaggagtcggggtgctctccccagtccgagcgaagggagggaactacacttcccaggacgccctgcgcgcgccgagccgggagccggctgcctcgctttgcgtgaccgcggcaggttggtcctggagcagataagcgcagaatatttaggcgaaagcgagaggaaggggggagcgcggggcaggaggagtacctcggccaagaaaattatgcatgcgttagggaagctctgagagaatggctgtggaaggtaagggacgcttggggcatttttaagctccctcttaacccgcgcaccccaaggcacacatccccgatgaagcttggcgatcgtggggaggcgaggaaagggggtggcggagagcgggccccttcctcctccacctcttggcactcacctgcgccgccaaggccagtaggcgctttaattcagttgctttggagagacgtgaagggtaggtgcgtaggactttgaggtaggaggtgtggagacgagtgtccctgatgcgaaacgatatcctggaaatggggggaaagccggaggatccggcatgaggttttggccccgagatgccctttttccctgccccctccctccggagcaggctgggtggccccggggctggggatgcttggttggcccccctcacgtgggagaggtccccagcccaggtgcgtcatccggaagcttggactgggattgggtcgagggcccttcgtcctatgcacccagcagcggcggccgcagatgtacccagagggtagaggtgtccctacacctgtctctgcttatacagccagcgccccgggcttagcaaagtttacagacatgaaatgtaatcagccagggaaaagaagtgcaacaacctcttcgatttgggtgaatccttttctttgaagatcactttcttcttacagtcttgagcttcggctttgcagttttgaccgtaaagtcctgcctcccttgaacttcctggttgaaagcagggtcaggctgttcgtgagggatcctgagtttttcatttcaggttatcttaccttggaacacaaacttccttg

SEQ ID NO: 13012 - DNA, 1455 bp, Homo sapiens
cacgcttttcccatctaacctttattccttctccccctcccccgctccatctccctcctcctttgagcttccctcaccactttctccatctttgagttctccttcctatccctctccccctgacccctccccaccccacccccagtctctggcccacacccttatctgtcactcaatcagtagaactatcctctttctagcgccctccatctctcctaccagagagggccacttggatttccctctgcgcctcctacctccccagacagccccctacccacatctcctgtcttcccaggtggccagaaagtgctgaggcaccgggcaggaggagttgctgagtcggcgcttccccagccggcccgagtcctcagcgtcccccggagcaggtggagcggggacagcggaacctgagcctccctccccgctccgggccgggtccacctgccccctgcgtcccacctcggtcacgagctcctcgcacgcgcccgcgggctcccagccaagtgccctcctgctgagaacagccctggcggcgggggcgcggccccagcgctgagcttttccccttccccaggttaccccacctccccaactgccccaccctcaatccctgaaagaggggacgccctgcttctctccccaggatgccctccgctctcccgccgctggcgttcttaccttgcagcaggcgcctgagcccgggcagcatcttgtctcgatgctcgggggagggggcagcggggggagggcgctcccactcgctccctgagcccgccggatgcacggcggggaccccgcggggctccgggagggcccgggagtccccgggctgcgtggccgggccgcggcgctctaccctgcgccgcccgggctgcgggcctcgggaggagccatcggccccgacgggacggggcggggcgcgacggggcggggaaggctggggctggccgtcgacgcccagcgcccgcgccccgctagctgcgctgtccgctcgagagtccgtcagtccgtctgtccgtgtgcccaggctgctagccgagggagagtggggacagcgaggaagctcttcccaaccacccccactccttcccgcactcgctggctcctccctcgtttgctggcttgccgacttaaccctttctcgaccactaggaggcgggagcggctttctaaccccctccaccccgcccccctcccccccgcttaagcgacccggaggactgtgttcgatcgtcctcgcggcgccactcttctagagaaatcccttcttgggggaatgcggtagtttagaggaacgccgtggacttgtcctgttcccccctcccaactttccaggagaagatgagcttctgggtcaccccctcccccgcccccagccgcgtccctcgcgccagtgtcccagcctccagcatttctgtcccctgggacagctccaagattccacttttcctt

SEQ ID NO: 13013 - DNA, 1454 bp, Homo sapiens
atatctggaacccctgtcattcccaaaagaggtactttctgtaccttccaatgttcctcctcctccatccacttagaatgccatccatctttgtgattataaaaacgacatcacgttttcttagtactaaactttgcccgtggaaagtctcccattcttcaaggctgggctcaaattccacatccttctcgaggccttccccgtgattcctccctccataaacttaacaatccattttcctgaaccccatcacatctgtttgcagttcacccgcaagcaggcgctttatattctttagcacgccacctggtatctcaaagagtctttgtgcacaacaaccattgcctgaataaacaagaaaaaggaactgtaggtaggagcttggtgagacaagtaaagaagatggagagtgattaaggataatggagtaaaaatatcacaaagggttctcaaaaagcagggagtgaaaaatgagtactaaacaggctcttcgagaaaagttttttcttgggctgcctttgtgcagcctaggggcagctcacctgaaccagaagtcccagccagcctcttccggggtctcgacatggtcacgctgcaggggactttagtgcggacgattctggaatcaacggagatacaagaaagaatgctaatgtcctccaaaacccgcgcagagcgagatggaggcaacgagaggcagcctagaacgtctccaacttttgcgaaacacagacgcctacgtttgagccctcaaatccttccctccgttatctgcgccatttccatctcgcataacctgcccctaaactcttctcggttctgtccttggtccttctcatccaggaacccctatctcagtatgtagttcactgggaagtggctccacagagacacttttgttgggtgaatataagtaagccttgtgttaccttgttatccttgctaattaggatcaactgaatggataatctagatgatgaagtaatttgctggctacagacccaacactctgcagactcgactgcggtccgcctccgctgcgccgcaggctgtgcagcgcgacccccgcggcgcttggtgggcggtgcatctctgcggcgccgaggccccgaggacttctgggaattgtagtcctgtccccttgggagcccgcctggcacctgggttgttagggctcgtgggaggactacaacccccagggtgcagtgggacaggcgttgccgggtcgcaggtcccgccagtgcgagcgcaacggaggtcgaaggcgttcagactcttagctgaacgcggagctgcggcggctatgctgtggagcggctgccggcgtttcggggcgcgcctcggctgcctgcccggcggtctccgggtcctcgtccagaccggccaccggagcttgacctcctgcatcgaccgtaaggatctcctggcgggcagtaggacaggtgtccagaacc

SEQ ID NO: 13014 - DNA, 1450 bp, Homo sapiens
ttcactccttcatctgctcaacacatatttactgagaacccactctgtgtcagttccctggctgggacctgacctggggcaagagcagtgcctagactcggcgcttgcctgcagaagctctgttgggcatgcatttggccttgtgtctggatgatgtttgcctctgaccaaacatgagggcagagccgggaggttagggtgaccttgtgtgcctggtttctgtgaatccctgtctctgtgtgtgtttgtgtatgtctgagtacagtggtttggggaccacgtcaaagcccgatgtggggcacagaccctcttggtctgagctgatagagtgacccaggtgtctttgacctgtccataccctgatgggggggattggccctgtacccatcttgttcttctctcagagccgagctgtggagacgcctcatctagaggcttggtcctcctccccttgtacacccctccacccccacaagctgccctctgatggatgggaacacattggtgccaagcacagaacagcctttgtgctccgccaccagcggcaatccatcagctccaacctgacagcagggcgtccggccctaatccccatccctgctggcttgggcacacagggccccctgccctgactgtagcctcctcctccagcagtcctgcgccctccagaggaagcccttatcccctactggggctccagggccacattgttggctccccaaccctgactgtttcaacttgattctgtctatttgcacgctgggctgatgtcatttgcatggtagcggctggatttcaaaatgctcagaaatccccttcacctgctccctgctccttactaccccttctgctgcacacccagtcacagccctctggccttcagcatcttctagtccctgctgattttgcaggtgggctgacctgggctgccatggtgcttggctaaaatcaaagcaatttttccattctggattctcatgtgcttgggaatagaggagcaagaaggagaagggtctggaagggtgggggcctctggctgctccaaacaggtctcaccatatattttcctaggctgggtctctgggtattattgatgaggatgaggtcgggggtgggggggggtgggggggggtggcaaatgcttgtgcatttcaataggacatagatgcataaaaattacatgcaaatcagcattgattatttgtggggcagtagctttgcagcaagatgagaacagatcacagaatcacagaaagtcagagctgcaaggcagtctagaatccactagtccaccttcttcctccacatatggggaaatggaggcccagagaagggaagtgacttgcccaagcgtacagaggatgagtgtcagaagtgtgaagggtgcctgttctgaatcccagagcctcctctccctctgtgaggctggcaggtgaggaagggtaagtag

SEQ ID NO: 13015 - DNA, 1449 bp, Homo sapiens
aggtggaaaccttgagtgttgaggcccctgggggctgctgcattctagtttccaagacagagtctgcagagctgtggcaaccctcagaggcccacacacacctccaaagccagcccgaccccgcaaggcactctcaccggggtataaattggtgctgccattttggaagacattggaggaaaacgcaacaaaatgtaaaatgtgcagaccaatctcctcagcagtttagaccaatgacaacaataactattcaaggacactcattgcagcagtgaaatgcgtggtccactttaagttgcttattataatactgaaaacttggactgacattaaccagtgccaacaatagggacttggttaaagaaattacagaaggaaattcactctatactgttcagtggaaaacaatcagtgagaagcatttgctcatatatgcaaaagggtgtgcacacttgggtgtgtgtaccgagattactggaagaacagtgtgaagagtggtctcctcaggtggtgggagtcccagcttcctttgtgagacatgagcatgtggagactagaactggtctttctcatagaaagactgttggttctggtgttctgcactctgcacgtttctactaataattaaaatacttactgcctctgagatgcctccggacacccttctgaatcacagtgttcagaaatgctctctaaatcaggaaggtgtggatgacctttggaccttccctggtgtgaggagtttagcacactgagagtaatatatgaaaaagaccgccaggcgtggtggctcacacttgtgatcccagcactttgggagaccaagccaggaggatagcttaaagccaggaggatagcttaaggccagaagttcgagaccagcctggacaacatagtgagatgttgtctctacaaatatagcccaaaaaaattagtggggtgtggtggtacatgtctatggtcccagctactggggaggctggggtgggaggatcccttgagcccaggagttgaaggttgcagtgagctgtgatcatgccaccgcactccagccctggcaacagagtaagaccctgattctaaaaaaggaaaaaggtcactctctactcaagttctacttatataacagcaatgcagctctcttcataaagctggctgttgtgtagtttatgttggggaatcagttcatggtttaaaaagttctgtcaatgcagagaacaagccggtgtgttttatggagaggctgtttaatctccactgtgagacagtaaatatttggctgttgcatcatcgtgaagcttatgatcacagtctggcgccatctccctccttgcctggagtctgatctgtcccggcccagtgtcctccaggaccctggcccctcatgcctccgtgcttgcgcgtgtgccatttcctctctccagaggacctttcctgcctaggactcat

SEQ ID NO: 13016 - DNA, 1449 bp, Homo sapiens
gtgaggaaatggctatcttgcaggctggccagaggggggccctgggtactgaagacggccttgtaggggtaggagaagccctggccgccgggcccgccgccctcctccaccgccatggcgttgtacaggtccagcatgaacatgggtgccgagttgtgcttgccctggaggtgcgggcgcgggcggtggggcaagcccaaaatggagaggatctcgcgctgcatctcccgccgctcctggctgcggaggcgccggtggatgaagctcgagtgcacctcgttgtccaggctgaagtcggccagggcggagcgcagcaggaacaggggtgcccagagcgccacgaagctgtgcggcgccgcagctcgcagtgagcgcacgtgcatcgcgccggctctacgcgctacccgggctccgggctccgggcccgcaccgccccaggtggcagagggggcaggcggccgtccgcgccgctcggtcacttgctgcagacgggccccgctgcgcccgcgccagacatggcccctccccggccggccgcgctctgcccggacccccgccccctgctcggtgctggccccgggcccctcgccccgcactcgcccgggcgcaccgcagggcttggaaagcagccccggcgaacgaaaaggcgagtgaggaggcgggcgcgggtgggaggagcagccagcaagcctaggagtccagagagccaacgccggggaggcagcgaggaggcaggcgggcgggcgagcgctccttcttcccgctcctctggcgctctcgccctcgggcggcggcaacccaccctcttccaacctccggcgcggatagcaggggccccggggcgctctcccagccttgtgcgccctggatcgcacaagaggccgcctcgggagcgccagagtggtacgcgctggggcctgggcggaggaggaggaggaggaggacgggcttcgaggggcccctcccgcgccggcggcctcccacctgccctcggccccgccctccccccagctgtgcccagtgggttcattcattccctctagagcgctcgacaaatgtttactgagtgcccacggggtgcctagagcctggcgggacgtcgcggggatgcggctggaggaatcggagccggccctgccctctcggcactcgcggtccggaccaggaaggcggcccgagcaggacgggtgggctgcggaccgcggtgggaaaagttgggggagcgcggaggtggcgcggaaatagaaggcttcctggaagcggtgacccttgagccggtcttgcccctcagtccctgtatccttttaagccagccacgctgacccctccgcgcctccctgaagccgttgccagcctgtctctgcgctcgccattccctccgcctggacctctccccactcaccacctcccgcccccatcagacgctgctttctcctcccagagacctcc

SEQ ID NO: 13017 - DNA, 1448 bp, Homo sapiens
aaagccattttatttggcaggatttgacagcaatttctgcaagaacgggataactaatccagttaaaaacgaaaaagaatatgcatactatttcataatttatattgaaatttatacattacagcaataattgtgcgactgtaatttttttttttttttttttggtggaggggtgttttttcctggagggacggagctcctgcagaccctattgggctagccgctcctcccacgtcgctgccgcagatccccgctcccctcccccacccgcggtccgtccctcctggtcgaccccgttcccgcccccgccccgcgcagactgcagccaggtccggtccgcggcggctccgcggaatgacccgtagtaacctcgccccgccccgggccgccagcgccgcgctccccggcccgaattcgataggcccagccccgcacgcgccaccgctcgcgggccaatgggtggcagcctctctgcataggcaacgagtgccggccgggggtgagcgtcccaggcggttccgctcaacagacgctgctgtggctgcgccgggctgcgacactgcagttgtctacgcggccggggccgggacgaggaggcgttggacggggtcgcatacgttcgtcccctcgcattgcggccccgacagctgcgccaggatccccgggcggcggcgcggggcgtgaacgctctggggctcagccaggcctgcgcgggcccgaggccggaggaacccggactccggcgtagcggtgagtgcggcgccggttgtgggagcggcgggagccggttggcggcgcggcctccgcgtgcggttcggctgggcccgaggggctccccagcctcggggcctgggaccctgtcgtcggcgccgcacctgaccgctgggtgtgcgcgcgggcggcccgcggcaccaggagcagcggcgagcagggtgggaggcggcccgctggggtccgggaagcggctgacgtggggcctcggccctgagcccacgcgagccgggagctgcagcgcgaacggcgtggggcggcgctgaccaggcagggaggatgcactgcgtgcctcccggcgctgtggggcggggtggggaggccacccccttgaattaagagggctctgccgcggccccagcagtgcggtgtccgtggaaggagactcagccctgcgatttcggaaaacccttgtttggcggggcgggaggggctgttgctgcgtggggtgagaagaaactaggtgcgtgaggtgggtcgaccttggtgattggttctgggcactatcgtggtggtgggactgggattaagactgtcgtttggggtttgagagttgcagctttgcttttccccaagtgcgttttaatcatatactgttgataggttgggtaactcggggactgcttactaccagcagtcctgtggggtaggtgttatcaggctcgtttcacagatga

SEQ ID NO: 13018 - DNA, 1442 bp, Homo sapiens
aacatggagctctgtattgggaagaatctggggccaagaccagactcaccagaaagtagtgctgtgattgattagcaatgcctgtcatggccatgggaggcaggagtggggacacctgtgccatcccctatttaggagattaatttccccactcctatctgtctagtctgtagcaaacagacctttaacataaagagtcaatgctcttctgcaagggtccaatatgctgtgcccagtagggcaccttatgcactccagaatagtcttgattttcacccagcttttgaagtgaaaaaaaatttttttttttgagacaaagtctcactctatcgccaggctggagtgcagtggtacaatctcggctcactgcacccttctcctcccgggttcaagcgattctcctgcctcagcctcctgagtggctgggactacaggcgcccgccactatgctcagctaatttttgtatttttggtagagacggggtttcaccatgttgaccaagattgtcttgatttcttgacctcgtgatccgccctcctcggcctcccagagtgctgggactacaggcgtgagccactgcaccctgcccagagttaattttctacaaaatagataccatcagctccctgccacctacagcaacacacatagcccttcaacacgtggacccaacttttctccctggcctcatcagcaatactcctgcacgtgcaccttatagtccaggtgtgtggaatttttctcattgtgttcggaattcacagtgccctttcctacattcttgcattctcatgtatgttccctttgcctggaacatctcttcctttcttcttatcctttaagatccagctggcctcttccgctgcgtgcgggatcctagcgcaggggcagcgcaagttccaggcgcccaagccagggaagaggcagcggcggcctctgaaaggaaccggggccgcaggaaagacggtcgttttacagctcccgagaaggcgtgcgtcggtcagcagcaaaagcttaagaagaatctagaagtcaggatctggaagaagatcgaacatgccgtggtgatgaaagccagcaacagcctgcccaagaagctggcactgctgaaggccccgaccaagaagaaaggggtggctgctgccacctcctccaacaagacaccttcctgaggatgctggccccagcacaggccaacactgcagcccccacctccatgatgggaccttacaggtgatcccacaggctgcattgtcaggaagaccaccctgtcccccagcactgggtctcacctagaacttcattgggggcctggcccttgggcagcagatcctagggtgctgagaacccagcaatggccaggaagatacagtcaccaatctcatctgcccctgtcccccttcccaggtcctaccttcacaggttcaacccagagcaataa

SEQ ID NO: 13019 - DNA, 1434 bp, Homo sapiens
cacaatctcagctcactgcaacttctgcctcccaggctcaagtgatcctcccacctcagcctctggagtagcgggactataggcacgtgccaccaacgcccaactagttttttattctttttgtagagcacccagccaacccgtcatttaattaacaaagttgaatagaagacatttttgtgttcctctattaattttttatttatttattttttttgagacagagtctcgctctgttgccaagctggagtgcagtggcgtgatctcggctcaccgcaacctctacttcctgagttcaagcgattctctcaggccactgcactgtctcaaaaaaaaaaaaaaaaaaaaaaaagcgaaactctggctcaaaaataaataaataaagactactatgataaggccaggcaccgtagctcacgcctgtaatctcaacacttagggaagcaggtggatcacttgagtccagcagttcgagaacagcctgggcaacatggtgaaaccctgtctctacaaaaaataccaaaattagcttggcgtgttggcatgcccttgtggttccagttactcaggaggctgaagaaggaggatcacttgagcccaagaggtcaaggactgcagtgagccatgatcacatcactgcactccagcctgggggacagagagagacctcgtctcaaaaaaaaaaaaaaaaaagagactactgtaataaattattgcaatatttcatcccatttcattccttcccccacttgcccattttttttttccaaaaagtgttttattactgcttaaactttccaggaagattatttctctaatgccgacaaactgaactctcctaattcacagcaggcttcactgtgtactttactgcccttccagggctaatttgccaaaggaacaagcttgggaagctaaaccagtggttaagtaataagtaatctgcagaattcaagactgccataaaatgcatattcaacttacttgaggtcaggccgaaccagttctctgctggttccagcatgttcggttaccgttatttttggaaagtcaacataaacgagagcaggggcacttcagtgaccagggtgacattcttaattaagaaaggatcttcagaaggttaaggccttgatttctgaggtgactgatttatttactcatccaacaaaagtacactgagggcattcttttgtttttttttttttttttgaaacggacgaactttttttaaaaacccaaatagaagacaatctattcagcaactatatccacagtggtattttacccagtactattttacacaattaaaaaaaagaaaaattggccaagcgcggtggctcacacctgtaatcccaacactttggaaggccaaggcgggcagatcacctgaagtcaggagatcgagaccagcctgaccaacatgatgaaatc

SEQ ID NO: 13020 - DNA, 1432 bp, Homo sapiens
cttgtgtgcagtggttacagaggcggcgaaaacacggttccccgctttcctctcctcaaggcactgtttgcagcggcagcagcggccgcattcggggaggcgcggtcctccccgcagagccgtcgcgcactcggcctttctcgaggatttgcctgggctcggccgcctcgctctcccctgcgcttccatgaccttctgagagcggcctcaccaccggaggctcggaggaagcaccaccctcggcgtccggggcccgtcgcgcggccgcgttcctccgactccttggagcacccgcgcgcgcgggcgcgcggccggggatcggcgggggcgcgcgggttggggcggggccggggccgggggcaggggcgggtcaggggcggggccgggcccgctgcgcccccagccgagcggcgtgcaggcgccgcccccgcgcgccgcagtcccggctggagcgactcggccgtggcggtggccgttaccgttgcctctgggaggctctggcggcggcggcggcccgcggggttcgcggagcgcagcgggccgcccttcgcccgtggccgcctcaagcagcctcgcgccgacacaggggaggcgagacggcggctgcggaggcggcggcgcattgtgcccggccccctccttggcggctcctgcccccgggcggctgtgggatctgggcagccccggggcggcggccgaggctacagagccggcggcaggggatggcaagatagcggcgcgggagcgtaccgtgagtcctgggggcgggtgggcgcggcgcggagcaggggagccgcggagccccgagcggggtccccaggggcggcccgggcggggtggggcagcgctcccagctctgcggagcgtcctaggggagtgaccccggagagcgccgctccgggtcccgccgctctccgcgcgcccttgggtcaccctcgtgtcctgggggacgcggactccagcgcccagaacttctgccccacgcagggcagtgagttctgaggccagaggttacctgggggatgggagggagcttgaaatgtttttccttcggagaggtgacctgccaggtgatttcgtgcccctctgcttcaactcccctttaaacctgttcctcgtcctttctgtatccgtagtgcatttgacttacctgtatttttatgtgctaacttccgaaggtggtgtactggttaaacccaaagttaaagtgttggaggtcaaagttaggctttgtgaaagatgccatttctgttatgttgtgtaaaagcacaaagctggattcaggagttctgagcgacacaaaactgcacatcacgtgttctgaatttacatgattaatctgaattaatgtgatttttgccccccaccccccacattccgctaccaaaaatatatgaggtcttttatttgcagttgggtatctttgtgttcc

SEQ ID NO: 13021 - DNA, 1426 bp, Homo sapiens
tggataagaggtgctctaggtcggaaggaaataaatgagactacgatcagttaaagttcggtaaagcaagagacgccttcaacccgacgaccagacggtggctccgcagcacagactctctcggatggtggaattcccaaccggcttcgatgtagccccgcccctacccagaccacgcccaccaatcaccgccctctcccccccaggccccgcctggagcccgcccctcctaaagcatgctccacctgactccgacactgccgggcttagtccgccgggcttagtccgtggagcgcttgcgcatttcttgagttgtcgtggcactgcccaaatctgaatgggggaaagagggaacttcatatttcctacagactccgccacagcgactttgcgtgctctcttagagctggttttgcctttcgtggtcctgagaaccctggcttttggttccccaatgcggcttaagtgtgcaggttttaagttaggcgatcttcgggcagccctagtcccagcaccgggtccttgcgctgagtctcgggaccacagccggggaggcggggtccttctctggggcggtcgcgttggcagcggatgcgggaagccggactctgggcgtcatgtactacaagtttagtggcttcacgcagaagttggcaggagcatgggcttcggaggcctatagcccgcaggtacgagtggcgcctggccagctcggacatgagaagtggcggccctagcctcggcgacaggcagtcgcggcgttggagccaggggaggcttctgcccgcggtcgagttcgtctctgttctccttgcacctcccggggcctctccacaccagcgtacggtggtcactgaggcttctttttgtgtacctgctcacctggcgggggctggcctggcgtggaagtttggtctggctcactgcaggggtcaaggtgacccccggggtcacttgtctaaaagggatggtttgtgggggtccccagtgtgacccgagtcagaggtccggccttctccctcaattcgaagacatctggctttcggcctccttgtcgtttgtcatctgccagagccccataggcagcctcacttgagctcgagattagagagcgcggggctataaaggcgtttagagaaaccatggtgcagggggttggggggctatgatctgggttgggaaatttaacaggttacttaacacgtccagggagggaagttgcatgcagcgaggttacactttcccgattgtaaaatatttgacagatgctcgttgtttgggttgtctgaaaagtattccatttcacgcagattctaccaattggagtttgactctccagcatgtgttgggggtaaacatgagggattttagagccccagacgtgccttttcaaatcatggcgttttccgctttaattgtgtgacct

SEQ ID NO: 13022 - DNA, 1423 bp, Homo sapiens
tgtagtcccagctactcaggaggctgagacaggaaaattgcttgaacccgggaagcggaggttgcagtgagccgagatcgtgccactgcactccagcctgggcgacagagcgagactccgtctcagaaaacaacaacaacaacaaaaaacagctaggaggtgacaatgactcacatgtcaatatgtggaaataaagttgtaataatgaggataatgtaataatgagagtaatgactaaattttcggctttacagaaaaacacataaagaaaactaaggggaaaaagcctttagctgatccagaatttagtgagggcaatgtggagaagtaggagaaacggctactcaaatagattccagtccacttcccctcaagattgtgtcaattatgcccgtgagcctgggtctcttggcctgtaaaacggagtcataaccacccgcccccgggaagacagaacctgcctgtccactttctgaacttttcatccccagtatcgacgtccagaggcctgaatgagtaaacgttccaggagatggagcagcctccggaggctcgctttgggcagctcagatttacccggaagccgatgccacctggccagaggtgaggcaccggcaaccagaagggggccctgagcatgaccggtcagtgccacccggccgggaagacaccatctccccgcccagtcctctagaatgactccgtcatcaataattcattaagaacctcctctcaattggctgacgccttcagccctctctggcagagatccaatcaggaaggacctgagagagctcgtctgaatagtgggcgagcgcgcgtgacgtagcggccgaagactggctgtggcagcacaaggcggggccctcctcgggcggcggccagcgcggccggggcggctcagtgcgagccggggagagtcgaacccggagcagggtcccatccgagcgtggactggcggcaggatgttcagctggatggggcggcaggcgggcgggcgcgaacgcgctggcggcgcggacgcggtgcagacggtgacgggcgggctgcgctcgctctacctgcgcaaggtgctgccgctggaggaggcgtaccgcttccacgagttccactcgcctgcgctggaggacgccgacttcgagaacaagcccatgatcctgctggtgggccagtacagcaccggcaagaccaccttcatcaggtaccgtcaccgcccctcgcccggctcccgccccgctccgccctccccacgtgtgcgccgcagtcggccgcctcccgccgctgcccctcccggccggcgcgacctcggggacccctcccggagctcggcgcccggtgccctcggccccgccccggctggccagccccgcgcgctggagggtcccgcgaacccgcgccctgcgcactccgagccctccttcct

SEQ ID NO: 13023 - DNA, 1423 bp, Homo sapiens
atctccctcccacctccctccgcggagcagccagacagcgagggccccggccgggggcaggggggacgccccgtccggggcacccccccggctctgagccgcccgcggggccggcctcggcccggagcggaggaaggagtcgccgaggagcagcctgaggccccagagtctgagacgagccgccgccgcccccgccactgcggggaggagggggaggaggagcgggaggagggacgagctggtcgggagaagaggaaaaaaacttttgagacttttccgttgccgctgggagccggaggcgcggggacctcttggcgcgacgctgccccgcgaggaggcaggacttggggaccccagaccgcctccctttgccgccggggacgcttgctccctccctgccccctacacggcgtccctcaggcgcccccattccggaccagccctcgggagtcgccgacccggcctcccgcaaagacttttccccagacctcgggcgcaccccctgcacgccgccttcatccccggcctgtctcctgagcccccgcgcatcctagaccctttctcctccaggagacggatctctctccgacctgccacagatcccctattcaagaccacccaccttctggtaccagatcgcgcccatctaggttatttccgtgggatactgagacacccccggtccaagcctcccctccaccactgcgcccttctccctgaggacctcagctttccctcgaggccctcctaccttttgccgggagacccccagcccctgcaggggcggggcctccccaccacaccagccctgttcgcgctctcggcagtgccggggggcgccgcctcccccatgccgccctccgggctgcggctgctgccgctgctgctaccgctgctgtggctactggtgctgacgcctggccggccggccgcgggactatccacctgcaagactatcgacatggagctggtgaagcggaagcgcatcgaggccatccgcggccagatcctgtccaagctgcggctcgccagccccccgagccagggggaggtgccgcccggcccgctgcccgaggccgtgctcgccctgtacaacagcacccgcgaccgggtggccggggagagtgcagaaccggagcccgagcctgaggccgactactacgccaaggaggtcacccgcgtgctaatggtggaaacccacaacggtgagctcggaggggcaggggagccgggaggggggcccccagggggcgccggagtgccggggccacgggtaggaagtgactggcagaagaaactggctggaggaagaggacaccccggggcaaagggaacgtgtgatggtgggaggggggtgtccgaaagaggatggcactgagccccctaccacccaggtgtctggtcttggagaggaggagatagc

SEQ ID NO: 13024 - DNA, 1422 bp, Homo sapiens
agagacaacctcaattttgcctggattgcacgcgggccgaggaagtcgggatgctccgaagggtttctgctctgggagtgcctctaatgtgggttttctatgctttctctcttcgcaattctcgacaccgtttccttcttcctcgctttcattccctgtgaccggagaacggcgctgaaggactggagaagcccaggagactgggagccggagcgccgggtacccacccgggcctccccgcaaccggagctgtgcggaggaggaggcgcggcgaacggggcggggctcccggaagggggcgcggtccgccgagagaggcggggctggggcccggacgcgcggcccagggggtggggacgaggcaggttcgaaggggcggggctgaccaggccggtcccccgggaacaggaaccctggtggacgggtcccagcaggcttcttcggtgcccgagagggagcgggtgcccaagggggtggtccctgtggcaggtcccggggtgggggcgcggcgctccgggaagagccttccgcaggtccccgccccgtcacgtgggcgccggccccggccgctgcggtcggtccgctggttggtcgggcgcttggtccggcagttggtcggtgggccagtggcccgtcgctcgcttctgggctctcatgtttgaaggtgggagggacacgggagcggcccgcacacctgagccgcccggagaggagcctcggccccgtacccaggtcagtgggctctccccacaccccgggcttgccgcgcggtcggggttgggatccccgtcgggagcattacctagggagtggagcgcccccagagctacgaaccacggggacgtgtgggtcagtgtctctgtgagccccggagcgtgtcccaggctcgaggacggggacccttctccaactccactggccagaagcctgggaggagggcagaactcctgtgggttggctgcgaatctccacccaaccctgcctgggatccgcggacagtccgcactcctgcaggtgccagcgtggccctggagatgcgcagggaggtggggtccctgagttctgtgcggcgcgtcccagccctgctcagcccggggagcagcggcgtggactagggagcctaaggaggttgcggaagctttaggtctgtcagcccaggcaattctctggtggacacagcgtgtgtctagatgcagggcctcggctaaagccagttctgtagtgtaagtgcaaaaatacagcacactttttaaaatctaaagccgccgcgtcccagtagactgcaggatggggacggtcctatttaaaagtgggctccctcctcacctcatcacatcagattccagacccgcagtttttcctcggatgaaaataagattatgtaacaagagaacagaacttccagcgtttggataggattaa

SEQ ID NO: 13025 - DNA, 1420 bp, Homo sapiens
cacctcacatcccctcatttttaaggtgaggacagcatgattgtcttcctggcaggggtgaaggacccaagatgggtatagaaagagcaggctccttagaagtaacctccgcacaagctgtccacagtcaactggaaggcaggagctggggaagcctggcctctccgcacagacatccttcatcctggtggggcagcctgccccgttttattcccacgtgaagcatcagacccagggcagtgggggcggggagcagctgtgagattagcaggcccctgccctctctgcaccttcaagttcagccttctcccctgcccctgcctgtaacactgctagagtgcccctcaatcaggtaaatggtgtttgtggtcagcaaggctgtgtgcaaagcctgcgccgagagctttgtcaagcatgagagaggcaggtcactctgacatgtcaaggagtaatctcccatttacatggctaaaactagcaggaaggcaggagctggagtcagggtgtctgtactcttggagcagcccaggaaaggggtcgttgggtctcaggtggctctccctggtctgcagccagctatgcccaaatgccaaggacctgtggaaccattgcaagtaaaataaagcgttaagagcattaagagcagcacggctcctctccttcccttcggtgcctgctcccgccctattccccgagccttgtgctgcgttcggcggtgctgccgaagctagacttgggaactctgggttcagaggggagcaccattttccccgagcggttctggaagacttttagcagctggttgagaaaacaaaacacaaaaaaacaaaaaacagattgcctgacaatgtctcacttgttggtgcaaatgtgcattttttaaaaaatgtagtcttaatgccaaatcctatttagtctccttttttcttatattttttgtttgtttcttaaaccagagagagaatttgacccaaataaacactgtggagtattggatcccgagacaaagaaaccttgcacaagatccctcacctgcaaggtatttctctttccataaaaaatacttcctgctctcgctggggcctttgtcgaaatgtttgcatgccactctctgcacacggcagggtgtggaacctcgacatgacccccagctgttctttgtaagggaaatgctttcttctcgtccatggtagcagagtgcctgcctcaagctggctggctttttaagaaggagaaaaaaaaaaaaaaaaaaactaggcttcccctgttacttgtgaggccagacagtaaattgtatttataggcactcacaggcggttctaaagcctgctacgttttaatgtatgcaggagcagcggcagcggcggcggcggcggcggcagcgccctgaaaggcagccctggaggggaggatgatatgc

SEQ ID NO: 13026 - DNA, 1415 bp, Homo sapiens
gctcaaatgtccgctgactgggggttcgccttaatctgtcctcgccaggagcgctcgccctcgccctcccgctggctcgctcctgggccctggaggggcatgggcccgggggcggttcgggaggggccccaggtgaagggcgcccgcacttctcctgcggcaatcatcgctctcctgcctccacacgtcgcggcagcggcccggccccgcgccgaaacagcagctgtgactgacggagtcacctccccgcgcgcctggccaccccctcctcccccgccgctccctcctgcaccaacacgtcatggaaacacggacgtcagagcctctcagccaatcgcaggctgcggcaggagggaaggggcgcgctggagggggcgggggcagcggcaagccaaggcgctcaggggaaggaagaaagggaggggcgtgcggaggcgcaagtccccacctccgcccctcactccggccaccctttcccgaccgcgcggcaagttctaatcgccaggcgcgcgctcgccagccgagggcgcgctcgccgggtcctccccttaaacgccctcccagtgccgctcagctcccagtcccggtccgagccgcggttcctccgcgcgcgcgcgcgcgcactcgcccgcccccaggctccccgcggatcgcgtcacgtgaccgcgctcagccaaggcggcagcggcggcggcgcgagcttcggcggcggtggcggctgtggcagcgggagcagctgcgccgccagcgtggagcgggaggcgtgtgggtgtggagaaaagggagcgccagaccggaacgggtgagcgttctcctccccctgcctaccccggcaatcttgcaggccacccggtgcagacggggtccctgcccggagctgcgcgcagccccctcgtgctcggccgtccgctctccggtgcccgcgggccccgccccgagtggggcgggctgcggcgctcacggaggtggctgcaccccgcccgcggctgctgttgcggacggcggcgtgaggccggctgagctgcccgtgccgagcgagcgcggcgcgccctgtgtgccgctctgcggagccgaggaggcgggtcctgcggggacgcgggcggccactcggtggctgccgggctctgggcggggacggccgggcgccgcctcctcctccttcgctgccgccgccgcctcctcgcagtgcagcgtgagtagggagccccggctggtggacgccgagcctctcggctccttggccgccccatccccgaggtgcagctgcacctccgcgtggcgccccgagccctgcgagccggctgcggacgcgctgaggacggagcccccatcctctgcgtttcccgctgccccttaacgccccgcgaccctcccgcagcctgcctttccttccccctcggaaaatggttcccact

SEQ ID NO: 13027 - DNA, 1412 bp, Homo sapiens
tgcacctagatcctcattgtgaaatgaagtatgaagtgattgagtgaggtctctattgtctctgacattttacaattccaggattctgccttcttgtcagagaagtgtataggcaagcagttgggcaggtgagagggctccgggtgagaggctcagagactgagggctcagcctctgcttgaagagtcatcatctgggaggctctgtggcctcctcagatgagttcattcacactcataccccaagatggagtcaacaccccctccaccatctcagccttctcagcatctaaagccccagcatcaatgcctctttttttgggttaggggtcagagctgttgtggaagggcatacagtcattcttcacttgcctttgactgtgtactctgtgcacatggaggtaggagcagacatgacttcaacaaggtcatgcccccttggcaagcatctttgagaccagagaggaagacagactagggaaagaatgaggagataagcacgggctgctgtgaggtccaggggagcaggcaaaggtaagagaaaaggctttaggatactaactaacatatatggagcactagcatgagccaggcactattctaagtgcttttcaggtgttatctctttttgcctcacaacagcacctacaaggcactgtaattatccctacttcacagatgagggagtggagccacagtgaggttaacttacttgaccaagggggccaagtaggaatggaggcatttgttgagtcttctaaagatgaggaaagagtggaagtgagattttgtaagtgcttgattcatttctaccaactgaactggcaaataaataaaagcatgagtaaatgggggtataaatagtctgtcagctatgggggtgggagtgggctcaaggcaggcttagagagaaggtgcaagagctgtctgaaaaggtcagagcaaagcatgaagctggtgagcagctgtgaccatagctggaagcttctctctgagctttctcctggttacctcctcctcccctacgtgaccagtcagccaagtgttaagtccaggggaacattttgctgcttccaagtactgtctcactagtgttatttgccataacttgcggccacagggcaaggtccaggtgctcagacctttacatcctggactttccaaggcctcccaaagctctctggcacccagggaacagtgtgcgtgtcgagagcttaatccgcaggagcatagccatggttctctggggtccagtgctgggagctctgctggtggtcattgctggatacctgtgcctgccagggatgctccgacaacgcaggccatgggagccccctctggacaagggtaccgtgccctggcttggccatgccatggctttccggaagaatatgtttgaatttctgaagcgca

SEQ ID NO: 13028 - DNA, 1407 bp, Homo sapiens
agaaaattgcaggggaagaaaaggtaagtcccgggattgaggtgtagcgactttctataccctcagaaaactaaaaaacaagacaaaaaaatgaaaactacaaaagcatccatcttggggcgtcccaattgctgagtaacaaatgagacgctgtggccaaactcagtcataactaatgacatttctagacaaagtgacttcagattttcaaagcgtaccctgtttacatcattttgccaatttcgcgtactgcaaccggcgggccacgcccccgtgaaaagaaggttgttttctccacatttcggggttctggacgtttcccggctgcggggcggggggagtctccggcgcacgcggccccttggccccgcccccagtcattcccggccactcgcgacccgaggctgccgcagggggcgggctgagcgcgtgcgaggcgattggtttggggccagagtgggcgaggcgcggaggtctggcctataaagtagtcgcggagacggggtgctggtttgcgtcgtagtctcctgcagcgtctggggtttccgttgcagtcctcggaaccaggacctcggcgtggcctagcgagttatggcgacgaaggccgtgtgcgtgctgaagggcgacggcccagtgcagggcatcatcaatttcgagcagaaggcaagggctgggacggaggcttgtttgcgaggccgctcccacccgctcgtccccccgcgcacctttgctaggagcgggtcgcccgccaggcctcggggccgccctggtccagcgcccggtcccggcccgtgccgcccggtcggtgccttcgcccccagcggtgcggtgcccaagtgctgagtcaccgggcgggcccgggcgcggggcgtgggaccgaggccgccgcggggctgggcctgcgcgtggcgggagcgcggggagggattgccgcgggccggggaggggcgggggcgggcgtgctgccctctgtggtccttgggccgccgccgcgggtctgtcgtggtgcctggagcggctgtgctcgtcccttgcttggccgtgttctcgttcctgagggtcccgcggacaccgagtggcgcagtgccaggcccagcccggggatggcgactgcgcctgggcccgcctggtgtcttcgcatccctctccgctttccggcttcagcgctctaggtcagggagtcttcgcttttgtacagctctaaggctaggaatggtttttatatttttaaaaggctttggaaaacaaaaatacgcaacagagaccgtttgtgtgacactttgcagggaagtttgctggcctctgttctaggtcatgattgggctgcaagggcagagaaggtagccttgaacagaggtccttttcctcctcctaagctccgggagccagaggtttaactgacccttt

SEQ ID NO: 13029 - DNA, 1400 bp, Homo sapiens
ctccgtctggaggtcacattcagtcctgccgcgtctcgctgggtcaggcagcaagaagatcagagctgagcccggctgcgggggacacggctgccctgctgggcctgggtccttggattttgcccggcccgggggtctgtgggctctggccggcattgctcgctgagcgtccgcactgggcacattggtgctggaggagctcggcacgctgcgccccggtgatacctggcccaggggcatcccacacgcaccactgacaacttcccgccacccaccaccctcggggaagggcacctcgcgcgcccacagcggcttggggacggcgtcagaggtggcagcggccgctggaggagccccgggccaccacaggcaggcggacttgtgaggagctgcctcccgcccgcccctctcgagccagcctccgcccgccgcgtccctccctccctcgctccctccctccctccctccctccctccctcaccgtgggacggagaaggatgtgaggctgagctgagccgccagcagacgccaaccagcagcctcgcagagccgaccgcggccgcccagcctgccggcccacttcggcccgctccctggggcatcttcccagccctatgtttccggaaaacttggccgagggggagacgcgaatgagaggatgtgagtgagtggtcctggggaggggatgggggactgcgggtgcagggacagggaccgcaacgtggccatctgggatttgaggctgggcagctggggagtcggagttctgggcccctggagtggatgggggtcccagcccatcctttcccccatgccctctcctctctctccctgctgggctgaagctctcctggaagcaggggtgggacctggatctgtgcctgggaaggtctgtgatgctgtgtgcacagggggtctctccaagtggacgggggcttcaagctgggtctggcggggtggtctccaaggcacggtagggtagaaagtctttctctccgtgcctggcagcctctgcctgggcttcccagaacaggaaccagaggaagccagtgccagcctgcccctaccccgcagccctggccggcactaatgggacacccactctggctcctcacacggcagttaaggaaactgaggccggagagcagaagggctggccaagactgctagcgagctctggccaggcgcctggatgactctgcccagctcctttgggagccgtatgttttcaggaagggctgggtgacccccacccccacctccatcccctctcctctgccctcaacccactcccactgcccccatgatcggagttaattagggtccccagcccccagccaggctcctagctacctccttatttattgactgagtttggaaatgtcaacctccccagtgtt

SEQ ID NO: 13030 - DNA, 1399 bp, Homo sapiens
tccggttaaaccagtctgaactcactgtctaaggtcctaacaaatgatatgacctttaggatttttaaacatggggccttagtgttcttttgtaattaatgagatttttattttagatgcctgaggaagtgcaccatggagaggaggaggtggagacttttgcctttcaggcagaaattgcccaactcatgtccctcatcatcaataccttctattccaacaaggagattttccttcgggagttgatctctaatgcttctgatgtaggtgctctggtttccacatttggcatggtttttttttttgatactctagaaggaggggaaaggagtggtttggcctttgttggggactactattgaagggggtaaacttgcagctattccaaaaagatgggttttactctggccatcttgaacttggaagggactatgtccagaataagtgggctcatggaactaactggttctaaagcctcaagatagggggcaatcagatttgaggctgagagaggtaaaccaagattttctttgaagatacgggctttaagaaagcaaaagtggctgagcgtgttggctcacacctgtaatgccaaggcaggaggatcacttgagcctaggatttcgagggcagcctgggcaaccgcgagaccttgtctctgcaaaaaattaaatattagttgggcacggtggcatgtgcctgtagtcccagctacttgggaagctggggttgggaggatggctcgaacctgggaggtcaaggctgcagtgagctgtcatccttgccactgcactgtagcttgggcaacagagcaagagtctgtcttggaaagagcaaaagtaagttgctgtttgtatttccaggccttggacaagattcgctatgagagcctgacagacccttcgaagttggacagtggtaaagagctgaaaattgacatcatccccaaccctcaggaacgtaccctgactttggtagacacaggcattggcatgaccaaagctgatctcataaataatttgggaaccattgccaagtctggtactaaagcattcatggaggctcttcaggtattgcagttctgtaggcattcatacttatctgtgttctttggttttttgcttctttaaaacttgtgattgactttaaacttgttggcaggctggtgcagacatctccatgattgggcagtttggtgttggcttttattctgcctacttggtggcagagaaagtggttgtgatcacaaagcacaacgatgatgaacagtatgcttgggagtcttctgctggaggttccttcactgtgcgtgctgaccatggtaagttagcttttctgttacaaggtagttgggttaggattttctgggctcacaccagtagcagaaattttgggcatc

SEQ ID NO: 13031 - DNA, 1393 bp, Homo sapiens
cacctccaggtagttctggaccccgacggcgcgctgagtgcccctgacggccgcgaccccgctgcgggcagaagcgggcggaggttaccgggggcgccctgccctggggtctccgccgccgtctgaggccagggccgcttccttccccgaacgtttggaacccgcgtccagagacatccgcctgcccgcccgcgccctccttcccgcctccgcccgggcccacgtggcgcccgccgctgcgcctgggaaacctacttaaagtcggtgcccacgtactggaagtacacaagatagcgcgcgcgcacggagcctgaggccggcgccgaactcatggcggagcccagccggtggcgtcagaggcggcctccagcgcaggaatcctgcgcgcgcgcggacgcggcctggtcacgccccccccccctcccccccggccccggccgctcttgcgcctgcgcggtggcaccgcgccacggcggccagagtcggggagcggaggcggggccgggcttagggagcggctgcaaagtgccggcccgccgccgagcgcaggcgctctacctctatcgcggcgccccgggaggcgcgcaccaaccacgcggtcaccccgcgctctcgcgggcgtgcattcgttcactcgctcattcattcgccgccgcccacactccccgagcgcgcccgttcgccgcgttgcggccaagtcctcccagacgtggtttttgcaaacgccctgagttgcgcaacggccgggatggttggagcgggcgggcccgcgccctccccgcgccctccccgcgccccacatttccaccgactgtccccggagacggccgtggcaggccccgcctcacttccggaccggggtggtccctggacgctgcgagaggcgtttggcgacgctccccggcggtgacagcgggcggcgcgcgcgggcggcggaccttggcgacgctccccggcagtgacagcgggcggtgcgcgcgggcggctgactttggcgacgctccccggcggtgacaggcggggcggggcgcggcgcggcggcctcattccggggcgggcgggcgccgaggcggcgcgggcgggacgagcggtccgggccggcgcggctgccgctcggcgccgcggtcctcgtgccagtgagcgccgcggccgccgcagccatgaccgtggagttcgaggagtgcgtcaaggactccccgcgcttcaggtgcgccgcccggggccgccggggtgggcgcaggccgggggcgtcgctgtcgcctttgtgcccggcggcggggtggggaggtcagcgccgggccgggccgcggccgccggggaggggctggaggaccggcctcggacaaagcggcggccccgccccgccatgccccgggggttggaacaaaagacg

SEQ ID NO: 13032 - DNA, 1388 bp, Homo sapiens
tgagtcaagatcgcaccattttactccagcctgggcgatgaccagagactccatctcaaaaaaaaaaaagaggaaactgaggctcagagagacaaggccggttgcatgatgtcacatggctggagagggcggggattggcacttggatctttctgacttcaaagcatattcctttccaccttctctggctaaaaggggtgcagcccatgggtgaccctccaaccctgccctgtacccaggccctgtgtgccttcccaggccagcgggcagtggtcggagctcagccctactacttggcacccccctctggattccccatcttggttcttgcccctcccttcctcacccaggccagcttcctggtcctcccaggctggttgatggatggctcagccccggctggcttgactcagtctagcttttcctcgtggactgccagggctgcctcctgtcctcctgcttaccgcccttgcccgcccagcaggtcgggcaagtgagtgactcacacacctgggctctgtgtgggcccagcccggggagccagcgtactcaccctctgggctcctgcctgctacttcaactgacagacgggacccttcccagtagaagggggctgcccctgtcacttgtgctcccttcccggaggactgcgattggactgcacaggattgaggtcagtttcctttctctttttaaccatctctgcccctcgctaaattggaggagaatcttttggaggtcgtgggggaggggtctcagctgtcattgacacccttgtgtgtcaggccctggggcaccctactccctcccagcaggtgctggagcttggggacaccttgggatggactctgtgaggagaaccgtgctgggtgcctctatgggtgtgaccccgatcctacagccacctagcagggcaggtcacggcaacctggagtgagaacggcagaggtggactgcaagggcgtgtgtaggggggacttccctcacttccttcttagggtcacagagtgagggatgcagcttgagatggcttcagttcaatggcatcattttacagctgggaaaactgaggcttggaggagagggagtaactgaggtggattgatgcattggtgctggaactggggttggaaggcggactggctgactccccgcccagggctccttccttggtcctccatgcctgttccaggctgtttccccctgcttttccactcggctctctcccatgccatccgggcctcagcagggaggaggaatgcagctggtgggagccatttcacagggggattttatgggctcacatttggaaggcattttgaaggtcatccaggccatgaacctctgacaggtggctgtttagccacagcttgactatctccgggaat

SEQ ID NO: 13033 - DNA, 1387 bp, Homo sapiens
gactgatggggtgtctgattttctgctataaagaggagagtgctgtatcaaacacactcctctggctcctagctctctctgttccactttgtttatccaatttccctactcctccttcgtaactgcaccatgtggattcaaaattgcagcttagtgcagacaaagggaaaacggaattctgaatgaccccaaagggaaaactgaactctgaatgacccctgtgggtttgagagaagagaagcaggaacttgagagaggaggaagagagaaagtaattaaaatgtatcgttttaacttaatatttaaccgaatgatagcaaaatcttatctgaaattggaaaagtcaaggttttgagtgctggttcggtgcccatttctttatgatttgatagtctgagaagaatacgacgggtgtggcttaaaaacctagatcacgtgtgtagttggaattgggtgttatatgagcaaacaaaataaatacctgtgcaacatacctgctttatgcactcaagcagagaagaaatccacaagtactcaccagcctcctggtctgcagagaagacagaatcaatatgagcacagcaggaaaagtaagcaaaaaatatattactgttgataatatattctcttcaatataacaaataaaggaatacagtattaataatgaataatttaaaatttaaaattcatatctaaattagatgatgaataatttaaaattcatatctaaattagaaatgatacactggaatatgatatgcaatatatgctataatatgtaatgtatactgaactacagtggaaataagctattcctaaataccttcaaaaagaatatatagaatctgtatctattgtctttatttcctacattaaataaatttgccgtaaagtgatagtttattccaagctaatcatgactgatttgtaaacctaaagttagaaaagtctttaatcagaagctatctttatattaagaaagcataatttaaatgtgttattatttgtattcatattttttgtgaacacaagaagtctgacaaaacttttatgagagggatttgagaagattttgaaatatacttttaatcttactataaaatatcttacaaaatactcattgatctcacagcattagaatcatcaaggttaagcaagacatcacattcaaattccgtttaaagggggcccattatgacacaattcaggcaatttccacagaaatcttatggaacagtatctcccctatataaaagtcaatatgatcttacagaaaaataataatgcaatttgaatcacttattagcactcagaacacaaatatttgttttttcttctataaatttatacttatttttcaatgtgtttacaggtgcacagaaatgca

SEQ ID NO: 13034 - DNA, 1387 bp, Homo sapiens
tttcaccaaggctctgatatcgtgctggtttccgaaagccccagccgaaggtgtgcagccaaagggtgacagaaggtgaggcacgtgcgggggcgcgggtgctgaccgccgcggtgcgccctccctccgacgtgcggtgtgcggggcgcagacaaccagcggccggcccagggctttcggggagcgaagcagggctcccgaggcaccgagcgagaatgggaatgggagggacccggtgctcccggacacgcccccggcaggtcccacgcccgggtcttctgagacctcgcgcggcccagcccgggagcggcccagctatataagtcccagcggaagaccggaacgcagagggtcctgctggcgcgagggtgggtaggaggggacgcggggactcggcccccaacaccgcgctccgtctgcagccgccgcctctgcaccgccgctgcccggcggtcggttcaaaaaacagaaatcgggtttgctgcccggcggacaggcgtgaagagcaagggaaaggaacttcctccaccttcggggctggagcccttttcctctgcatctccagtctctgagtgaagatggggggcctgacagcctcggacgtacacccgaccctgggggtccagctcttctcagctggaatagcggcgtgcttggcggacgtgatcaccttcccgctggacacggccaaagtccggctccaggtagctaggcagaggggtaagacaaggggtctcaggacagaggggacgctgttgcgtgcattccatttattctctgctttggtgtaaccactgtttctaggtagggtaggtgaccttccaaagcagtctggccttgtcccagggctggtgctttaggatgggaaactggaactttttctgggattagctgaagaaccaccagggccacagagaatgggttgaccatgactactaccaaattctcccaaaatttagggtgcacttagtattttaagagctgagaatattggcctctcctgagtttactagtcaggtgctttttcctttctttgattcttcgggggttctgtcctatcctactgccctaggggttctggagagttcctggggagggggatattcaaaatgtgcattgtagccagcctccctccatctgcgcgtgagcgaacacacacacacacacacacacacacacacacacacacacacacacacggtagagggaggtggatggaagaggaatgttgctgagaaaagaaacggaaaataggaacacagggggaaatcttggcttaagagtgaactcaatttcgctcccttctgttctgcacctttcttatttccaggtccaaggtgaatgcccgacgtccagtgttattaggtataaaggtgtcctgggaaca

SEQ ID NO: 13035 - DNA, 1383 bp, Homo sapiens
aaaactgaattgcaaaagcggttcctggagaacagaatgtgagtttttaagtgacaagggagagggagggggagggagagaaaattctgaagcgcccagtcttggaggatgagggaggagggcaattccctaatgtccattggaattcggaaggacaggcaggccgggcggactggagacggcggctcgccttgggaccctctgagcttgcgggccccgctgagcacccaaaggccggccctagagtccaggagaagagcgcagcggcgcggagctcccaggcgttccccgcagcgcgtcctcggtcctggaaccaccgcgccgcgcgtcctggcttccacatctgccccatttgcccgcggatcttgactttttcttggcgggcaaggcctcggtctcctccccgcagcagggctgcccgcggctgcgggaccctcctggtcctgatgcctggcagaatcgaaggggtgagggtacgctctctgcagcagaaagccctgggcttaaagtcctatttattatttggcgttgccacttactggtcggtggctttggtagggcgcgtttctgagcctcagtttccccatttgtaaagccgaagtacatagcgctttccctgcagagttagaaatttcgacgatgtgccgcgcgctctagagcgcgctcagcaagcgggtcccaccgtgcccaaggcaggaccgcggcgcgatgtcacctatgcaaagtcgccgcaactcacgggaatcgcagctgtgtgctcaactttcccctccccgccgccgtctttctccccaaactggcttgggggtcgagtatccggggctctcccccgcactggcgcttcccgcgcgggcgccccaggtgtccgttccgttccgccctctgcctggcagggcatccagaggtgtccgcgctcccggagctgggcggagcggggcgcagcccacgtggttcgggcgggaggcgccgggacgtggccagttgcccgcctgccccggagagccaggcgctaaccagccgctctgcgccccgcgccctgcttgcccccattatccagccttgccccggcgccctgacctgacgccctggcctgacgccctgcttcgtcgcctcctttctctcccaggtgctggaccagggactgagcgtcccccggagagggtccggtgagtgcactgagaagagggaacagcggggccagggtggcgcccaggactcggggcttaggctttggggggtgcgcggtgtcgcgtgcagacccactggtgtgaaaacgcccccagccgccagcctcccggcctcggtccaggctggtgaggacagcgcgttcccagccacccagccttagtcccccaggcttcacctggattctttgagcagact

SEQ ID NO: 13036 - DNA, 1376 bp, Homo sapiens
acctggagtattcagtggcaaaatcttggacacaggaatacagtaacacaacatattggtctagcaagcactggaggagactgaggcggaattgtccagcgaatcccacaaaaatggaaatgaagaggtctcagtatctctaggtgcccgggtccgatggaataccgatgtacataccttttctaacacagtagcattagtttatatatcagcattacctctcttttgtttcagttgataagtatcctactgtaatccattcattcacactttgcttgttcattgttgaaacaaattctccctggaacaaaattctagtaaccaaatacatcatatcaggggaaacttccttacagcagggatggtattaaagtaaaaagaggaggaagtcccttcttcagctctggcagggacccggctggggaggaaaccttcccgcaaggtaggtgatctgctgtggtgaccaggctaaacccactctacagctgcaggagggactggcatcccttagaggtgaagaggggaggagacccacctcctggaatgtgtccctgtggtctccagatgatttcttcctctaataaggacaattctgccaaaggaatggaatgcttcgtcacaggctcaattactctgtctccgccagcctaccacctataaacaattcctcaaattaggaaagcggggagatttaataaagacataacacgtaaagtgtaggaaaactatttgtatggcattccgagacgactaggtcagagttaacaagtaaggagcaaagtagttaataataccaattctgtttacccatcacaacacctgtgctgaatgtcagggtttaaaaaaatctcccaacctttatctaaaaagatagggctacgtaacaatcggtgtggtttttgtcggtagaggtctaggaagccgcaagagtagtggacgccttgacagctgcccttctcgcgggccccgcggcggcgtgcccgtgtggttgcgtgcgcgcggacggggcggggctgaggagggacgtgcgcgcgcgcggacggggcggggtggagctcggagggcggacgcgctcggggccgtctggtcggcagggggcgctgcgcacccatgccgcgctctgcctgcccccgggtgctgtccgcggcggttcgattggagcagccgccgaagagcgcttggcgccattttgaagcggagaggaggaggaacggcagggctggctgcggaaggggagggggggggagaaggcgattggatgcggcggcggcggcggatcccggagagccccggagtgagcggagtagcgagtcggcaacccggaggtaggaaacaattcagttaacggaaagaaaatgtctctcttctctggctgc

SEQ ID NO: 13037 - DNA, 1371 bp, Homo sapiens
ctggggcagtgaccttaacagcccctccgctgcccaggggaggcttgggatggtcacgggattgggatagtggcgtgacagtctccaggcggcccagggcggacaccgcccggggcagtggccagtccgcccctccggggcccgggagaggctcagccgcgcgtgggtccgcccttcccccggcgcctccagcgacccgcccgcagcgcatctggggcccggctcgggcgatcggccagccctacctcttcggtggccgtgggacagtaggagatgagcacgagcgtggtgaccacgttgacggcgagccccagcagggtgatggagttgggggccatccagagcgggatccactggagcagccaggtccagtagagctgcagcggcggctcgagcagcgagacgcccgccgcgctgtagcggtgctcctccagtcgccgcagctgcgccgcgctcagcggctcgctcagcgccctcagccagcgcggcgcggacccggccccggcgcctgccgccatggccgcctgagggccccgccgccgccaccgagcgcagcccgcgcctggcgctgggggcagggagaggtggagggagaggctggcggccgggtcctgcgactgccgggctggactcaccggtcgggcccgcacggcggaggtcgaggtcaggccggcctgcccggctgccggggccccagccccagaagctgtggggccgcggctgcggctcgcgggtggggcggggcctcggggaggggtccggctgggggcggggcggagggggtcctgctaggggcggggaggcgggtgccgcgctcgcgggtcaccctcggcgcccgccaacggcaacttgttatcggcgatcaaggtccttgactccccaggggccggctgcactgcgcctgaggtctgatgtcttaacccacggcgtcggattacgccctgaggtcgtctcctcgcgggctgcaccacgaccgagccggttcctctcctaggggtcggaacacgactccggtcgcccagtgttagccactgcaggaccacgctgcccgcagagcctgggggttttcgtgtgagaacacagttttgcagggctcgggtcacgggggtgacggccccatctgtcctgcttggtaaaacacacaagcacaattctccctttctgtacggaggaaggcggccctgccatgtattcgctctagagacccatcactgcggattcagagaccaaggttttgaaactgaaaatcagggcttagaaacactaacaaggagaccgaatggctgaaaccccgatacctattttcttcagcgcatttgataccaacaagggtgaatatttttacacatactcttccctggaataaagggc

SEQ ID NO: 13038 - DNA, 1364 bp, Homo sapiens
aataaaaatcaagtcggggttcgggggagccccctgaagttgggaggtgggacttccggggagaggggtctcaggggcgggacttataaatgaagaccggaagtggggtcccgggagaggggttccggggtgaaagagtgagtcacctaaggagaaaaaagtcaagactcaccagggcctcatggagtctccgcaccgcaccgcgggccgatttggtgccggatcacgccactgccagcttaggttaccgctccaactttctccccgggccctgcctccctggagaaactttattacactcacttccggcctcactaacccctgaccctctacctcagggtccctccttcacgcttcccactttcccgagttagccaatggcagcgcgagatcgcgcacaaaggcagtggtggccaataagacgcctacttttgacccacgctcgttcttgagaagcgtgagaactgccctccaataaggatccgaagagaagtaaatctaagccaatcggaggcttgaaagtagaggtgtcccgcctcgagccaaacggaccaataggaagtgcgggcggcgtgtttgaaagcgaggccaaagtgggtgggagcgcgtgctgttgggagttgcttggaggttggcggcgcggggctgaaggctagcaaaccgagcgatcatgtcgcacaaacaaatttactattcggacaaatacgacgacgaggagtttgagtatcggttagtgctggcgcgggagcaatagcgagggtcgtgagctttggccgctgagggcacaaggaattagtaacaggaactgaggcgatagaattggcgcatgcgtacgaggtgcgaacgggcaatggtgtgatattgtggaaggcgtaaggcgcatgcgcggaggtgggaggcgctcgtaaaacaaagtggttgcgaatttggagtcgcctctcagtagagaggagagaggggtgggcgtggttagggtactgaccaccctcacccatgaggctttctggatcattctctgaactttatcgggcaaacttaacttgccttgtagagactgtttcacagtaatcttgtcgaatccagtgggagaacgtagcaaaagcggagctggaagtttcctggcgtccctaacaggagagtagcgctgagagagttgaatattgcttattaactcgtgaaaaagacaaggggcgtggttgtctggcttgtgtaaggaaggggatcgcttgggactgcaatggaataaaactggctaggagcattgagaaaatacttaatatgggtctaatagatgccctttaaatatcaaagggaacagttacggaatacttaacaggtttcaggtgttctgctaaagtgcaagg

SEQ ID NO: 13039 - DNA, 1360 bp, Homo sapiens
ctcatgctcttccactctctgcttcctgacttctgctctctggttttctatcctcttctttctgggctgtggctcagccagctcctggcctgggagggctgcgtatagagaaggcccggctgcctgagcgctgtcctcggtgctggagtcctggtgggctctgcatgcttgaggaaaacaagcaagggcattgggaagaggtgatcttgcttggaggtgcagatgttcatggggtgcccaccaggatgcctacccttattatttcagaaaatgtgcaactgggcttcctcctttcaatggcagacactgcaacaggtgtccaagccctcagcccagcagtgtgggcatctgtggctgtgtgtggctatatggccatttattgtggctatgaggggcttcttgagacctcgtgtgccacatacagttgtgtacgaagatcatgatttcctcatgagacacctgtgattccatgtggctgcctgtgaccatgttactactggtgaacacatatggcagcctgtgatcacactgagtctcctgtgaccttgcgtagcctcagacctgaactcgtgcgtccccagatgatctgggcactatctggtctagctgcctgatttgtcagagcctaggtgaacacttgccactccctcccctcactggtttgcagaggtggcacccggaggctccccatgtctgcaaactcgggtcctagggggcgttggtgtcagcgggcaacagcccacaggagtgtgcacctcctaggacaggtaaccgcgacccggctgccattcgagcctgcccagccataaaacccaggctgcgagtcgcgcgggggcagggtcgcgtgttgatggggtgggtggcggcggggtgggctcaatgtcacgctctggcgctcgtcgcccgtgctcccccttccagccggtttccgcagaatgccaggtactgacgttggagagcggggccggagagggctggttcgctctgcggccgggcccctcccccgcccgggagcttggcggttccgacaccgcggtcagtgcggggcaagccccagacccggccggccaggctgcagggcagggagtaaggctcggttgcgagtgcgcgccgcgccctcccccttgagccgtctccgcagcggcgcggggaggcgggagctgcggggccggagggcgggggctaaaaatacccggcagcggcggcggcggcgcggctactgctggggctgctgggctgcggggctgcggggctgcgggtcggggaggccgggccgggccgggccgggccccgctgaccgccatgctgaccttcttcctcgtgtcggggggctccctctggctattcgtaggtaagtgcc

SEQ ID NO: 13040 - DNA, 1352 bp, Homo sapiens
tcaaatatcagcagtttcaggcacttagccctaatatccattaagcccttagaacagtgcctagtacctcataagcatttagtaataatggccaacaggtgctccttaccgtgtcaggtagcgtgttgcccattctgcacgtaaagctcatttaatcttcccaactatcctatgaggcaggagctactattattttcattttgcagatgaggcacagagaggttaagcaatttgtagtaggtcccaaagttgattggcagggctggaatctgaacccaggcagtctggggccagagcccactttcttatcatgtcctgtagtctcttggtagctactaaccatcattatagctattcctgggctgtcttactctggaatcctgagctccaacctacaagggctccagttctgcctcagcaaaggggtgttcttttttacccctcatccccggcctatttgcaggggacccctgatgcaggcagagctgtctcttacctcctccatttttctggcacaggtaggggaacctccagatgttgccgaggcccacagagaagccaatctgggccaggatgtactgcagcttactgttccaggccggccggtcctctgcatccagctcctcctccaccgccttctgcttgccgcctgcctcaccagccacattcagtacactctgcttatagtccacaggctcctcgagggccagcaggtcggccacggactcagtgacatgctcactgctgtgctcacgctgggtcactttgctgttcttcggcattgatgccacctgggccgtgtagccctgctccccagcacacagagaagatggaattcagctgctgtcagctccttctcattcagggacctaggaaaccaggtgagcagtaaaggattatctgaccacaccaggaaggtgaggagcccaacgtggacacaacccaaattaactccccatcacactgtgaggcaggtcaagggcctcatatatgcagcttgccctagctccccatcaggggctgcccggtgaggagctcaaggcctacagactcagtttctccagaggcttgacccgagcattatttgaaaagtaaacctaaaggggcaaaataggcaaagccatactccgaacccaagtagagcattatccgtgaagacatttccctcttccatactgcagagcttagagtgctcaagcccctttggaggcccatacagccttccccttccaggtgttctgcttagccaaaaccacatggcggaagccacggaagccagcgccttccttccttagggccttttcattcaaaatgcagggattgcaccaggaactggttagaaaggggcatct

SEQ ID NO: 13041 - DNA, 1346 bp, Homo sapiens
cctccggcttctgatgaaacggcgacccaccacccccttcccagaccctggcccgcagccggatcactccgggcgcgctgccgatcacgtggcgaagcggtgctccccagcgccgtggctgcgcgcccattggtcggcggctggagtcccgggcgcgcccattggctgcggggggcgttcacgtggcagggggcctgggatggaccccggggtcccgagagctggcaggaaagttaaagggggcagcgcggccgcggggagctcgagtcccgggtgactgctggagggaggaggtgaccgcgcagctctcgtgcacggacggacttcgccgcccgcggggggcgcgaacccgagcccgggcccagctcctgccgtcacggcagctgtccctgttcccccagggcgtatgctgccgcgggctggcgcgtctgccctcgggacttatgagctgaacccggtacgtagctccccaagtctcgagtccgagggaagggctggggacaacaaggcgagggcgtgcagcggggacctctttgggttcctgtcacctacattttcaccgtgcgacttgcactggcacaccggggctggaacactctaggtagctggccccagggagctgttgcttcagcgtggagagggcgatccagggaccgcagctgggaagcgcctcccgggcccacgtgctccaccgcgctgctgggcccggctgcgaccgtgacccgggagctgcggctgcggcggctgatccctttaccacctgttgttctggcttcgaaactagcacaagttcccagccccgggtcccgagaggtctggagacttctccaaagttgggtagtggggtttggagcttaaggacaagccgcttcgtctctctccgggccttattttccctataaaacgcgaggaaatacacttggtaggctctcaggccaccgagggcgacgggacctagcacgatccccgtcccgggctggcggaggccaggcggccgcgcgggggtgctggtgtcgcgctgcttgctccggccggggttgcccctttgccggccccgcccgggtgcgataacgggctcctcctcctcgtcgtcttcctcccaccgccgacatctccgggaacccagcccaggccctgcctcccggacacaccgacgctcacgtagtcgcgcttgccacaaccctgcgggctctccgatgcggcgagcgagctggggagggggcttctccgcggcccaaaaggtgggtgcggcgcgaggccaaggaggcttgtagggaggttgggggcggagtgcagccctggtcaaactggacggaggggacagagtcggagagtaacttgtggga

SEQ ID NO: 13042 - DNA, 1338 bp, Homo sapiens
ttataaaggcggctggaacaaccctgcccgccagaccccgtcgcccggatcccctgagctgcccgccatcccacgtgaccgcgccgccccccagctccaccgctgagtgagttggggcgcgtccctatcccgttcccagtccctcgccgagccgcgtggtgcactgaagccggcgtggggaggagagccgatgaaggagaacgctaacatgggggctccaggcagaatctctaatgggagagatttaggacctgagggagccgggagacccgggagcccacggtctggtcggccacctcctctcctccccgggcgcgaggcctatgagaccgcaagccaccctccaagaatgcgcgtgcagtcgttgccgtggcaacgtgcaagcctgcatgggcccaccgctaaaggaaaggggaggttgttgggggtgtgggggctggtcccctggaggtccaaactcatcacgcggcggtagcacgagggaactgggaacgtcccctcccccgtgtcccaaatcctctgggagccagaacgcaagtcgcatcgcctctctgagcctcagtttccacatctgccatatggaggcaagattattggttccaagttccccgaagagttatctggagggtaacgatccaggctagttcccacttatggttggacgtccaaggaatgggtttaagcggctcagataactcctgcgaccccaccccacccccaggcccgctcgccatggccctcttcggggccctcttcctagcgctgctggcaggcgcacatgcagagttcccaggctgcaagatccgcgtcacctccaaggcgctggagctgggtaaggcgcaggggcagacagggacggacgggagcggacggggttggggtcgccccaacagtgggcacgggagctaagtaagggtttctctgctgcttcagtgaagcaggaggggctgcgctttctggagcaagagctggagactatcaccattccggacctgcggggcaaagaaggccacttctactacaacatctctgagtaagtggggggcggggcctcgcgatccggggcggggcctcggcggtggaggcggggcccgagaaatctcagggtctcgggagactggaggctgagtgggatggggcgtggccaaatcgatgaggcaagacttaagaaaccggatggggccgaaaagataaaggccaagccagtcatcataggcgggaccaggcagatgggcgtggccttgaaaatgtagagggggccaagaaggaagcaggaccagtggatgtgaggcgtggtcgaagaacaacagaaaggtggagtcaaggaacttcccaata

SEQ ID NO: 13043 - DNA, 1335 bp, Homo sapiens
ttgtaactggttcttcaaggggagaagcaaatgtgtccctgaaaacttcagctgccgcgtttggcaccaggtttgattgacaaggactggcggagggaaagcgcggaggctgggctgggggccgcaggccgaggcagagacaaagaggtttcgcctgtccccgagagtggaagggcccctgggggtaactagcctttgagctcaaaggggcatttcgtgaggtcgccttttggttcggagagcgcgcggcgatcgggtggagggggcctggcgggaagaaagctggggcggggaaggggcgcgggccgaggtgggagcggagctgcagtcacgtggccgcccgccgccgcggagttggggctgttcttccgggttggaggcgcagcgccgcggggcccaagcccgggtctgccagcgcgacgtcctctcgcggccctcagggcacagcccaaggctgtcagcctcccggcccaggtgagcgcgacggcactggcgggtgcgggcagccggggcgcgcgcctagggcgcagctgggaaaggggctcgggcctttcctgaagaccacggccctcgccgggagagagacctgtcaaagagcaaagcggggcggggtcggcggtgtcccgggcgcagggtgcattggggtgtccgcaggccgcaggcttaggtggggaagaagcaccgtgcctcttggtgtccctttctcgtctcctgctggggcgatgtcgaagggagtgggctggtggatttgggaactgggtccccgaagagggcagggaatgaggcggcagctgtgcaggtgcagatatttgcagctttgggggacagcgagagtcgtacggggtcatttcggccctcaagatcgggggtggtggagagggaggtcatagaggactttcgatgggcggttcatccagagaggtggcagctggatgcccttgaggtatgcttgacccttgagggagttcggagagggtgtccggctggggacataggagattgcgagcacaaattgtgagtgtgagttggggcggtctggcggtggtgggtacaagtttctggggcctaggctggtgaggaggaagagacagcggagagggcgacctgggcagagctagttcaaactcaacagccggaatgactatttgcagccgtggccaatcggcttcctagggaggttataaatagcggtctcgtgcagatgccagcgggtggcagttagttgccgagcaagggacggcaccggtggcagtagccgtgacaccagtggctttgggtgaggtcacggcgcctgccagccgaagctggctcagtagggtattgtgtccttgctgg

SEQ ID NO: 13044 - DNA, 1318 bp, Homo sapiens
cagagattgtgtctttccctgctgaaaaacactttgtcctcaagataaaggccaaatttccagctaagcacacaggttcctcatgatgtcctcagctcccttccgctgcttctccactgttttcccactgcactgtgatacttccaattcttgaaacatattttataccttcccttgctttccttccatctttgtgcatgctagttcttttgacctgggactccctcctccctctgttaggggacagcagaggggacaagcaaggcactagggtcggactgggggattcatatcctacctttgccactgagaggccagtgggtcgcctgctgtgttgctcaatccctaggtgagtcagcgtcttcatctgcaaaatggggatacaaggtaacaacagtgactccctcaaagggcaatggtgaggattaaatgaggtaacacacgcaaagtgctcgccaggcaggcccacagtaatcattgaataaatatgggcagtgtggcccactcctacttgcatttcaggtcttagcttagtcatcacctcctctgaggttggctgtgtgctcccttagtacatggtatctcctcttctaccacagcccggcacctgtcatccccaccacactgcaaactctccgaggccaacagccagtcgactgggttggctgctggtggggacgcataataggcattcaggaaatactgaatgaatgacatggggtgagggtcccagtgatacgagggcgtgcagaggctgtagggggcagtccggggtgggggtaggtcgtgagactgaatgggcaggtggatctcaactctgcgggggacagagagagcatgggcgtccaggctgtccagggctccttcttgccctgggactgaccctgggagggcgcagcgccctgggagaggatggtgctcaactttaaccgggtcggcgccctcgggagaaaatgcagcctgacgggtcgggtgagcgcgctcggccccgccccggcccggcccggccccgcccccggccccacccccgggccttcgcggtgcagctgaggctgcaagtagccggcgccgtcccgcgtcgcccccgcgcagggcgggccccgcacgcttattctgcccgggaggaacgccggcgtccagcccgctaccgaccgccgctgcgggatgctgcgctccacgtccacggtcaccctgctctcgggcggcgccgccaggacgcccggggcgcccagcaggagggtgagtagcgggggcgggagccgccgccgtcccgttcccccatcccggccgccccctctagaggggactagggatggga

SEQ ID NO: 13045 - DNA, 1297 bp, Homo sapiens
agctgctgtctggggatcttaggctagggacggcccctgcacctgccatcacctgggctgggacccccacctagggctccccctccccacttggacgcctgcgggcccatgcctatcccactccggtgaggcctcagcctggtggagggggcgcaggcttgggggggagggtggcagagcttcccacagggctgaacctatgcccacaaagccatgacttgcccctgcctgaggctttctgttccccaggaaatcagagaccccctctcctgaaaccgccaggcggccctcacaagtcccttcccctccaggacctgcctggcgccacctccttccagccgccgggtccttcgagaggccccctctcggggctctggccggacttgggacaggctgtgcctgagtttcctcacctgtgcaagggaggatgctggattgtggggagaggggaaacggaccccgcccccaggtgccgcgcgccccgcccctcccaccggccgaggggcccattggctgcggggcgccggggcggggcgcgcggaaaagagcctcgggccaggagcgcaggaaccagaccgtgtcccgcggggctgtcacctccgcctctgctccccgacccggccatgcgcggcctcgggctctggctgctgggcgcgatgatgctgcctggtgagtggttccagggaaccgtcccgggcgcagcgcggggcagggtggctctccccgcaggacgcgacgcggaccccgagcccctggcctgctcgcaccccgcaccctggcccggcttcgggctggtccctgggagcgggccatcaggtgcacagtggtctctgggtggagagccccgggccggggaggccggggaggtcggagggaaccttcaaaggtgaactgtgagagggaagtcccgcctctgagcttgttagtggggtcggggccgggccaagcaggacgcttcacctgctgcgcgaggcgccctgggttcctgggattcacctgtggggctacccacccccactatttagccgaggagggaagggagggcagacaagctgaggcctggagtgcaggggtgtgggctgaggggacccgtctcctgcctgggggaggacatggggctgctgaccctggatcccacccctgctcctggagtgacttgggctggggtgtgctgaggagcttcaggctggaggccgggttgcttcccgccagtttcctgggcagataggggctggctgctcccctgctgcctctccaggttggagatgtggtcatggagacacgtccactattgtgt

SEQ ID NO: 13046 - DNA, 1276 bp, Homo sapiens
acatgcggacatatgggaaataggatgcaacatttgcactaatgtttcagacacagttagaggtttccaagagattttgcgctggggaggctgcttgctacaagctcccaaagctctgggaggacatagtattcattcctccctcagcagaagcggtgaggcaagaagctctggggagcacccagccttggacttttagcatagtgtgtcaggtcttcatagtttgggcccagggcacagagaagtcacagctctctggcatcctgtgacctttaccctctttgccaagggaaaatgtggcccaccaaagcaagaaacttgagggcatgggtcaccccagccctggcatctgcccagagcccgagaaggaaggaacaatgatcctccagctacctcacggggctggcacaggtgaccactgccctggcatcacccagctgtgtccggcagcctgaaccccatctgtggggatgcgaggaggaaaatacaaaagtccttaggtgaacactgagaaggcagatgtagcagaaacctccaggccagaactacccagtcttggacctatggtggagatagagcatagctggcaatcatgtgtacttacactctaaggtcacctggttgcactgtggcctcatctgtggctctgaaaatgaagatttggaaggagatcatcacagctaatgttaacaagcccctcctgtgtgccaaatcattcacccctcaccacaaccgaatgagctaaggattctcattatatatagtttatggagagggaagtgcagacataaagaggtgaattatcttacccagatcacacagctgataagtggtggaggcagaatagaatctaaacagtgtggctccggagcccacatgcattgattcgacaagtgtttattgagcacctgccacggacaaggccttgtgtgattaaatagggttataattagtaatataaaaatgagaaatcactaatgctttttagacttaacattttctttttttgtaggtttcaggcacagaactgtatatccaataatagtgaaatggatcccactaattatgacagaaatgatgatacatttaaatgacttggatgttttataggtatgatctcgtgaaaccttgagagaaactgaatgacgaatgaaactattgttcctgtttcacacagaagaaaactgaggttaaaaggggtaaagtaattttgcatggcatgaagtagaaattcaaagtacaggaatttgaacttggttctgtccttttctgaagc

SEQ ID NO: 13047 - DNA, 1273 bp, Homo sapiens
caagaatatcacgcctctccaacttacttcccctccttgtgcacaccctcaccctaaaccatacatacaacacagacaacattaatatattattaggtcttttgctaaaaagagtaaaaagttatttccttaagatcaagcaaatactaaaggatagtgtagctaacattagctattttgcgacatgagttcttaatactaaatgtcatgagttctattaaagttgtgctgatttaaatttcaaccttgtatagatattttaatatcattttgacaatatacttctaagctgtttatttactttaatggttttgtaagaagtttctgcatacactacaagataaaaacttgttacaattaaaaaggatttgaaggaaccatgaagttattttaacagtaaacatgtttattttttgtataaattgtgcattttccttttttacatctacatagtaatttttaaagtataatttctgaaacatatggcttagctgttctacacaggtgctacatagagctggagaacatattgtgcttatatgtattcaagcatatgtttcaatcctactctttttacaataaacatttcatcgacttcctgctatttatatcaggaacacgtatttggccttgatttcacctgctctttttgtagagagacttacaaagagactctgggaggttatggaatctacaggaaataaatacaatgtcgattttgttacaaggtgattgagctggtaaggaagtggttaaaaaataaacctttacaactgtaagtgtagaatgagataacaatgtgttactcttttcgtttttttctgattattttactctccccaaaacccttttacatttgtacaaaaacttaactcagtgtttaaaaaatattgtttctcatactataatcacaactctagttttaagaataaacagttaatataccaataagaataactaataataatagtagctaacagtggataagtgctcaccatgggcaggctctggtctatgcctgatcccacttaatcttcataacaaacggaaatgatcagcactgttatttatattttgcagataaggaaaacgaagcacagagcaattaaataacttgcccaagatcgcccaagatcacccaagatgtccggctgaagttcttaaccattaccttacactaatcaacagcaacaataataataaccacctttctaggatgcaaattatgttccaagaactttcattatttcattacatctgcatagccccaaga

SEQ ID NO: 13048 - DNA, 1261 bp, Homo sapiens
gggaggaataggagaggggagcgggccgcgcagccaggcagcgcgtggggcgagcgcggggagagcggcggcggctcgcccaggtcgcgcagcggaggccgagcggggtgcgcggtcggcgacggagggcggcgcgcgcgagtgagcggcgcagggcgaggaccggcgggcgggtgccggtgcgcgggcagcaggggcggctgcggcagcagctgcgcgggacggagccgcggcgggagagaccgcgccggcccctcgcctcacccccttgcggccgaggccggagaacagtctccaactcgccgggggaccggaaagaggagccgagaagcgcccctcggcccccacgcagcggaggcgcggagtggcgggactgctgctctttgtgggtgcagcacgcacgacccggagcgccctccccgcggcgctgtccccggcgtcttcgtcgcgccgagcggccctggagcggggacccggaggaagcaaaaccacgagcccgaaacctcgcgtggcggagctcttggggagcgccatccgctccacttccacctccacatcctccaccggccaaggtccccgccgctgcatccctcgcggcttccgctgcgctccgggccggagccgagccgcctgcgctgccacagcagccgcctccacacactcgcagacgctcacacgctctccctccctgttcccccgccccctccccagctccttgatctctgggtctgttttattactcctggtgcgagtcccgcggactccgcggcccgctatttgtcatcagctcgctctccattggcggggagcggagagcagcgaagaagggggtggggaggggaggggaagggaagggggtggaaactgcctggagccgtttctccgcgccgctgttggtgctgccgctgcctcctcctcctccgccgccgccgccgccgccgccgcctcctccggctcttcgctcggcccctctccgcctccatgtgccggatagcgggagcgctgcggaccctgctgccgctgctggcggccctgcttcaggtacgcggcggtccccgcgggccgggccacgggcggggtggggcgggcggcgccgggtccctttgttccccgcgccgctgcggggccgggctgcgcacccgggaagggaggtgccacgccgcgccgcgccgcgccgcgcggccggtagctgcgcaggcatcgggctccgtccgggcgccggggcagggttgccggggccagtaggtctctcgcgcctttc

SEQ ID NO: 13049 - DNA, 1261 bp, Homo sapiens
actgggagacagtggtctctacgtgacactctctgcttgcagcccctgatctctctaggggcactgaccctcccacccttgagcctgaggagaaaagttagtagagagaggccagtagttggtagggagagagcccacttccagcagaaaagaggtgttcaggccttcacctccctgagatcggagcatcagagccctcatggctgctggtttgaagtaaaatgtgctgcaaacataaaatacacagcgagtttaaaagatttagatccaaaatatttataattatttgttgaccacacatgaaaaataatattttgggtataatggcttaaacagtattacaaacaatttcacttgtttctttttattattactattatttttgagatggagtcttgctctgtcacccaggctgcagtgcagtggcacaaactcagctcactgcaacctccacctcctgggttcaagcgattctcctgcctcagcctcccaagcagctgggattacaggtgcccaccaccatgcccggctaatttttgtatttttagtagacagggattcattatgttggccagagtggtctcgaacttctgacctctgtcctctcagagtgctgggattacaggcgtgagccaccatgtccggagtctttttattactatttttgatctggctaataaaacatttaaaattcacaatagctaacgttttattttttagaggattgcttctctcttaaaatcttaggtgtcccactccaaagaccggcggccagaaaggttatgaaatctgaaatattaaataattgtcattatattgcttccatttgtgaacaacgtgtgtgtgtgttttataaacgaacataaccttcataacgttatacaccacaatgctaaaaaatgacccctggttagagccaggcgcagcacagacagaaagccctgcctgaaagtgactggagccaagagcctgacactctcggctcattccgtacagtgtatggtagcatcttctgacacgcaaggcctgagggcgcggtgcctgcactactatccaatcagggcgctggggtgggaactgtccaatcaggcgcgcagccagggaggaaggggcggcttccggaatctggcgcggcctttgtctcacttcagccagagagcggggttagggcttcattgccttgtgtcctctgctccgggagacttcggtgattctgccactccctccgtcgctctgtgacctgctggcattgaatgattta

SEQ ID NO: 13050 - DNA, 1258 bp, Homo sapiens
gctccagagactcatatccctcattctgctctatttcaggggaggactcataggaagactctgagcccaagtctctgagccttgagattttgaagacctagcggggagggagaggaagatgcctggaggattcccataggttcctcccacaggctagccctgctgggctcccccgagcttcttcctccatactgtgaacctgctctttgctgcttcctagctcgacttttcatcatcaccaagccatttgtttctgtttgtaattatgcattttaatgttcattaattatggaatgcaaattgctctgagtacaaaatttgtaatgagctgttttaccaccccacccccaggtctagaaggtgggccagctgttctgagcagaaggaaaaacaaccaacttacaaaacagaacaatttgtcctagggcctgagtgaatcatatggtaaataagcctgggggacttcctgctgatgctggaggtggggccctgccccacctgggtcctgggtgacatcagtgtggcaatttcattctttgctacaaacttgggcctgaaaggcaggtggggtaaaggaacagcactagtcttagaaccagccttttactggctatgacaccttgagctagtcccttggcttgtctgagcctcagtttgtccttctggaaggtaaggattatgatgaaattatcctcaaagtaggggtggcaggcaaacactagcaggccctggataaatgcatgtgaatggctctccagattgctggattccagttctgcctggctgtgtttttttttgttttgttttgttttttgagacagagtcacgctctgtcacccaggctggagtgcagtggtgcaatctcggctcactacaagctctgcctcccaggttcacgcgattctcctgcccaagcctcctgagtagctgggattacaggcatgcaccaacacgcctggctaattctgtatttttagtagaggcgggggtttctccatgttggtcaggctggtctcgaattcctgacctcaggtgatccgcccgcctcagcactcccaaagtactgggattacagctgtgaggcaccgcacccagccaaaaatttccagttgctttcttttctttttgagatagagtttcactcttgttgcccagactggagtgcaatggcacgatctcgactcactgcaacctctgcctcctgggttcaagcaattctcctgtctcagcctcccaagtagctggaattacaggcgtg

SEQ ID NO: 13051 - DNA, 1258 bp, Homo sapiens
atccaccataatcaagtgggatgcagggatgatttaacatacccaagtcaataaatgtgatacaccacataaacagaattaaaaacaaaaccacatgatcatctcaatagctgcagaaaaagcatttaacaaaatccagcatccctttatgattaaaactctcatcaacaaaactggcacaccttaaggtaataaaagccacataacaataaacccacagccaacattatactgaaaggggaaaagtagaaagcattctccttgagaactggaacaagagaaggatgcccactttcaccacttctattcaacatagtactggaagtcctagccagagcaatcagacaaaaggaagaaataaagggcattcaaattggtaaaaaggaggtcaaactgtcactgtttgctgatgatatgatcgtatacctagaaaagcctaaagactcatccaaaaagctcctacaggatgcaaaattaatatacacaaataagtagctctgctgtacaccagcagcaaccaagctgagaatcaaatcaagaactcaacccctttcaaaatagaaaaaaaaaaaacttaggtatatacctaagattttgggtgacgataatgtgtcattgtaggttcattaaatgtaacaagtgttatactctggtggaggattttgataatcagggaagctggaagggaggggtgatatatgggaactccctgaactttctgcttaatttttctgtgaacttgaaacttctctagaaagataaattctatcagaaacataaacaaaaaagaacagagaatgagagtgggggagattttttacaagaatgtatagaggtgtgacaaaggatgactagatgggaacttttagattctggaaggggacagcagtgcagcaaagctttcatatgggtgtgagctgtcatgcacatggctcctatctgaaaatcttgttcttctagaatccaggtctgctggccaacatctcagcagttttcaccctgcagacttaattaggcttcctcttccttatgtcccctccctgaatatggcattttgaaagcccagtgttgcccagggggcatctcctttgtgtttatgagagacctgcattctccctggctcagttctctcaggctctccagagctcaggacctctgagaagaatggagccctcctggcttcaggaactcatggctcaccccttcttgctgctgatcctcctctgcatgtctctgctgctgtttcaggtaatcaggt

SEQ ID NO: 13052 - DNA, 1230 bp, Homo sapiens
ttgagacagggtttcacttgtcacccaagctggagtacagtggtacagtcttggctcactgcaacctcaacctcccaggctcaagtgatcctccagcctaagcctcccaagtataatagctgggactacaggtgcatgtcaccatacctggctgattttttacatttttagtagagacgaggtcttctatgttgcccaggctggtcttgaacccttgggctcatgggatctgcccaccttggcctcccaaagtgctgggattacaggcgtgagccaccgtgcccggccacactgtttcttatggttcaacctttagtatatacagttgacccttgaacaacatagggattgggtgttgactccccacacagtcaaaaatgtgcatgtaacttgattccccaaaaattcaactaatagcctacttttgattggaagccttactgataacaggtagccaaataacacatattttatatgtcatatgtattatatactgtattcttataatcaagtaagtgagagaaaaaatgataaggaagataaaatatatttactgtatttatcggtattgtaaggtttttactgtatttacatatgagatgaaacatctgtctgaaatggcagcaaccacagctgtggacttcaatctgtggtacatatcaagcaattcagctttttcttgtaatgtcacgacttgttttctgcttcttgggagcacttccagcatcagtagtggcacttcatatgggtcccatggtgggattcaaggtttacagtattgcactaagcatgatgaaaaataccacaaaaactgcaagaaatcactttttccatcttactgggataccagatgtcctggatatgaactgctgaagcggggatgggtagtgtcacacacgttttaagcagatacttgcagcgcttgagctcactacagtaacaacaggaagtggctacattaacagcacactgtgtactatagttaattttatgcagttacggtttcagactgcatcccgacattggtttacatttctcttgactgagaatggtgccacgtgtggtctgtaagtaggtaagttttgttaagttttaccttttaataatagatgtgcatattttatggtagtaagtgataaaatagactagtatttacatgtattttatacattcatgacataagtagcttcttaatttctttgatatttctaggctgtgcaattcatctga

SEQ ID NO: 13053 - DNA, 1226 bp, Homo sapiens
ttctccagaaagtggaaccagaggagtagcagaaagagacagtgattacccttcctctttggaacgatagcagcatgaacctgtctcactgcagaattattttgagacaggcttatgctgctatccttcaaaagaacacatccacccagctactgaggtttccatctctgggtttgctcagaaagacatgctgctcaggcctgaattatgtgttcatcaaaggtcctaacttctgaattattagcttcctaatgccattgtgtttgctcaggatcaaaatggactgaagcccatagctactctattagaaacctgttccccactcccacttccccatggcacacacctttcctccctcattcctatgatgaaaaacagaatttatagacatagccctcaaagtcttaaataaagttaaataattgtggaattattttgagacaggctcatgctgttatcctgtaattatatccatgaggtggtcctagatgctgctagagtgtccacttggcctagcctcaagtggatgctgatttgggggtagtgatttaaagttcctttccctgaagttaagacaagcagcaacaagttttcttcttggttctgtgcttcagaacacatccacccagctactgaggtttccatctctgggtttgctcagaaagacgtgctactcaggcctgaattatatgttcatcagaggtcctaacttctgaattattgtttttttgttgtggtaataatacatgatataaaattgaccattttagctgtttgcaagtgtacagttgagtagtattaagtatattcacattgttgtgaaatgcatctccagaactttgccgtcttgcggaattgaaactcgatgccaattagctttccccctcccccatcccctggaaataaccatcctattatgtttctatgaatattactagtttagaaaccttatataagtggaatatttgtctttttgtaactggtttatttcacttagcatattttccaggttcgtctatgttgtagcatgtgacaggatttccttcttttttttttttttttttttttgagaccgagttttgttcttgttgctcaggctgcagtgcaatggggcgatctctgctcactgcaacctctgcctcccagattcaagcgattctcctgcctcagcctcccaagttgctgggattacagacatttaccaccacacctggctgattttgtat

SEQ ID NO: 13054 - DNA, 1200 bp, Homo sapiens
gttctcttgtctccaaacccagagtcctctttgattcttttgggtttggtttgcttttttccttttcctacatttgacagtatctcgagtggtcacaaatgtaaaaaatgtctagcatattgcctggcatataggaaaaattcagtaagtgataatgattatcagtgctgtgccaagctatggagccagccatatatatatggatgtgtgcatatatatatatgatgtgtgtgtatatatatatgtctttataaattttatgtatttatttctttcaaaaatattaaagtatttgagaaaattgaaaaattaaaaagtaggtttattacgactcatgactttaagtttaaatattttatttctgccccaaacaaaatttattataattttactgtcctggttttaagggaaggaaactcatcaataatattttcatcatatgcttttgagaaacaaagttaaccattaagaatgaaacatgaaaacatgtgaatagtggtacaaatttttccttttgcttcaatatggctcagcatggcactgtcgaattttgtctttatataaaattttgatattttgtttgtcataagctttttaattcattttgatattgcactaaaatatttttatcttgatgactgaggttttttagtgctcccttaaattttgcacctaaaatgagtgcctcaattgttttaccctaacctcagcccattattattttatcttaaaactcagcaaacaccctaacctgctctcttactgaggaggctcgcccaagaataaatgagttccgtcattgcctttcttctctgacttttgggaccatttgcttggtctaggacctgagttgcaggtccaggaaagcgtgtactctcgaatccacccaggagtgcctgactacagtcctcctgcagagggcgctgtggagtcccagacacgagtgttaggtggaatcgggctgattgcccatcacgtcttgcctttccctggcagtaggcttgttatgaaatcattgactttctatttgcctctggggcttaagcgaatctgttaccctcaaataacctatctgatctcagacaaatgccaaacagagctcagtttctctgccctgtgggtggccataaaatccagacaatttccccctaggtgttttcgatggcgcagccacagcttctgtgagattcgatttctccc

SEQ ID NO: 13055 - DNA, 1200 bp, Homo sapiens
aaaagaactcggtgtttgctctgcaggtttgctggctaccttctcttttcagtacactggaaatagcagcttgtgttgtttacctactctttgatccttttttttttttttttcctcttggcctcaggctcctgttctggatgtcagatatgcatctgcctcctgagaaactggtggctttgaacacttggtgtggactactgtgttatccgggatatcaggtattatgagacatcacctagccatctgcatcacatctctctggacaagcagctattaccaaaaaaggcatatacttccagtcctgtgctccatctgccttaattctttgctcgttcctccatgttggcgccacttcccagagagctccactgcatctcacactctgcccacgtgctggggaagtctcacggcctgcacatctcttgtgactctgggaaccgcctctcccgccggagcccccgagccccaccaatggcagctcttcccagtcagcagcttcagagcaggcagtctccttggaaggcccgactctgttcctgcatggcctgcagtttctactttgtgcatagagtcattttcagagtcaccgcgaccctgttggccttctagaaagtttcttttgttcttttctgagacaaccacctaagtgataatacgcttttttggaaactaatatatattgccagactgcatcataacctttatcatgccaagcatcctgatgcaactcacatttccctaaacatggggtacagttatgatttataaattgagttggcttaaatctccctcttctcccttcccaagtgttacaaagatcatttactgcaactgtcgttggacactgtagcttaaagggaacgtggacctcaatgctttctgccttcaacttttcagcattgtgaccccagggtggttgccaccccatcttttcctgaccccccccacccccccacctccaagaggttcggcccacatcactgtacctggtgcttgtaaatttggaattggtgccttctccttttggcaaccatggttatcaatcctttttctgttttagtgtcttatttcttctttcaagttatttgctagccaaagatgacatcactgagattaggagacaggggagagcttgctgcagattctgacagtgcagattttaaatgtcaggatattagaatagctggcgctggttta

SEQ ID NO: 13056 - DNA, 1200 bp, Homo sapiens
ggaacctcttggacctcatctctgaggagcaccgcctggggccctgggtgtgtgtcccgcagcatggcgcggggtgtgcacgtgcgtgtgtgcgctcacacgagcaccggctgccgcctccccgcctgtctccaggtgccatgtgtggaggggagaggctgggcgtcgctgcctgcagcactggctctgagccgttggccaagcctctccattttccttccccatcactctgtagaccctcctcactctttctgttcctgttctgttgccgtttcaactcctcctcttggaccctttctgtgcttcctgaaaggtacctggtctctctctccccgtgtgcaccccctgcctcctctacactgttcactgccccctagcaggacagggcaggacgctctcctgtagttcaggcccagggactatgtccaccactctcaccctccaaagccccagcacttttctgccccacggatggtgacttctgtcctctggagctcctattaacattgcctccaaggcaggagagtggacaggcctgagtgtgctcctgtgcacggaccactaggctcctccgggacccgggcgcccctgctctgttgcccccagctctccagctctcggcttcccatcctttcaccttcccaccgggagagactcctccgcagtcttaggtccaacgcagccgacccgtccagcctcaccctcctctgtgtggggcactagagggtttgcgagcagcagtgggagggctccccaaccctcctcggtgcctccagggtctgggctttctggacccaggggcattttgcagtcagcagtgaggatgccaacaaggcctattgggacagggcaccatctcactggagctgtgcttcctctccttcccctctgtgaggagttccgtgggccatggaccagctgctttcaagggacgtgcccgtcaggagggagggtggccagcccccaggcagccctgactgtgtgctcccctccaggctgaaactgccgccaaccggatctgtaaggtgctggctgtcaaccaagagaacgagcacctgatggaggactacgagaagctggccagcgacgtgagtgttcccccagtgaaagtcagggccacctcattatcctcagccagaggtcactgtgactcttgcagggggaaagcaggtgtggcagcgagatgacctagaaaaggct

SEQ ID NO: 13057 - DNA, 1200 bp, Homo sapiens
gtcaactgggcatcactaaggtcttcagcaatggggctgacctctccggggtcacagaggaggcacccctgaagctctccaaggtgagatcaccctgacgaccttgttgcaccctggtatctgtagggaagaatgtgtgggggctgcagctctgtcctgaggctgaggaaggggccgagggaaacaaatgaagacccaggctgagctcctgaagatgcccgtgattcactgacacgggacgtggtcaaacagcaaagccaggcaggggactgctgtgcagctggcactttcggggcctcccttgaggttgtgtcactgaccctgaatttcaactttgcccaagaccttctagacattgggccttgatttatccatactgacacagaaaggtttgggctaagttgtttcaaaggaatttctgactccttcgatctgtgagatttggtgtctgaattaatgaatgatttcagctaaagatgacacttattttggaaaactaaaggcgaccaatgaacaactgcagttccatgaatggctgcattatcttggggtctgggcactgtgaaggtcactgccagggtccgtgtcctcaaggagcttcaagccgtgtactagaaaggagagagccctggaggcagacgtggagtgacgatgctcttccctgttctgagttgtgggtgcacctgagcagggggagaggcgcttgtcaggaagatggacagaggggagccagccccatcagccaaagccttgaggaggagcaaggcctatgtgacagggagggagaggatgtgcagggccagggccgtccagggggagtgagcgcttcctgggaggtgtccacgtgagccttgctcgaggcctgggatcagccttacaacgtgtctctgcttctctcccctccaggccgtgcataaggctgtgctgaccatcgacgagaaagggactgaagctgctggggccatgtttttagaggccatacccatgtctatcccccccgaggtcaagttcaacaaaccctttgtcttcttaatgattgaacaaaataccaagtctcccctcttcatgggaaaagtggtgaatcccacccaaaaataactgcctctcgctcctcaacccctcccctccatccctggccccctccctggatgacattaaagaagggttgagctggtccctgcctgcatgtgactgtaaatc

SEQ ID NO: 13058 - DNA, 1200 bp, Homo sapiens
ccagttgctctaagtggattggatatggttggagtggcacagactggatctgggaaaacattgtctgtaagtttgggagaactcttgagttgatctgatatatgcaagaaaatgtaatggtaatttaaaaacgagtattttaatgtgatttctgtttgtccccactttcaccctaaatagtatttgcttcctgccattgtccacatcaatcatcagccattcctagagagaggcgatgggcctattgtaagtatatatttttaactttttattagaagcataatgtgtagattttagactacatagctaaagatgtaatcatttgtggtggttttatatagaggttagctcaccctattcagctggagctgttttgggtattggacaacacatgaagaaaggatctgctagtataataagttagcagtttaaaactagtatccaggtttgtgctgaaagctgtttctctttccttagtgtttggtgctggcaccaactcgggaactggcccaacaggtgcagcaagtagctgctgaatattgtagagcatgtcgcttgaagtctacttgtatctacggtggtgctcctaagggaccacaaatacgtgatttggagagaggtatgtaatgaaaagggttttatttgtcattggtgctaaatatcctaggtattgtagttacacttacgtatttaattaaaggtgtggaaatctgtattgcaacacctggaagactgattgactttttagagtgtggaaaaaccaatctgagaagaacaacctaccttgtccttgatgaagcagatagaatgcttgatatgggctttgaaccccaaataaggaagattgtggatcaaataagagtaagtgtcctttgaaatatgtgatcaaactgaattgtgttttcactcttaagagtctgatactaatttttccccccaaaatccattagcctgataggcaaactctaatgtggagtgcgacttggccaaaagaagtaagacagcttgctgaagatttcctgaaagactatattcatataaacattggtgcacttgaactgagtgcaaaccacaacattcttcagattgtggatgtgtgtcatgacgtagaaaaggatgaaaagtaagttttattaactctgttatatttgcttcctaacaactttgctgtaaaattgagggatcattgtttggtgagtt

SEQ ID NO: 13059 - DNA, 1200 bp, Homo sapiens
tacgcctggctgatttttgtatttttaatagagacggggtttcactatgttggccaggatggtctcgatctcttgaccttgtgatccgccttcctcggccccccaaagtgctgggattacaggcgtgagccaccgcacccagcctaatttttgtatttttaatagagacagggtttcaccacgttgtccaggctggtctctaactcctgacctcaggtaatctgcctgcctcagcctcccgacgtgctgggattacaggcatgagccaccgtgcctggccaggagtttattaaccttcatgcccaccacgtcaaccacaaaccacgtgtggctgcagagccctcgaaatgtggctgctgtggctgaggaactgaatttcaagtctttatctattttaatttcagaacagatactcattcccattcttggaaaacttttaagtgtgtgtacaacagtttgggtgtgtggatatactttgttcaactatcaattttatgaaatctctgtacagattagccatttctactgagaatttagcatccaaattgagatgtgctgaaagtagttttaccctgggtttcaaggactaagtaattaaaaaaaaaagactataaactatctcagtaatgtttatattgattgatgataatattttatatatattgagttaaataaaatgttattaaatttacttctgtaacatagctactggaaaactgagaatttgaagtgtgtctcacactgcatttctattgggtggcgctgttacaaactacaggaaggagctagaattctgtggaaggttttaggcaggggctgacatcctctggccaaaatgacaagagggaattccagagaccagggcaagtctggccacagggagactgcatggcctaggagacctgagccacagccgccaagagaagccctgattccccagagaggaggtgcccgctgccagtccacaggtgagcaacaagactggatccagaagagggaggagcctttaggagaggcaggcccatcgcaaggctgactgatccttcaaaggagcctcccagctaaaagccagcaggagagagaccttggccaccaagggtctgccagctcctggtggtccccactccagccacctgccagctcgagcctgaccctcgcctccaccctggctgctgcctgtaccgctctcaggtttgaaac

SEQ ID NO: 13060 - DNA, 1200 bp, Homo sapiens
aatggagtccctttcctcagagtgcatggcctggcaaaaatccttgaattcagtatcaacttcccttcacaggcaaggctctgcaccctccccacggatgcctaatcctgaaaccattttgttttaggtttagttagaaagctttgtctcaagagcacttttgtttgttctgttttctttaagtcaaggtagttttgaataaaggagacaatatttgagtatttacaaatcgggtatttagactatttacacatatacaagttctgggtgaagtattctgctccaatttgcaatctacgcacactttgctagaaaacgttaagactgaattcaaatcaagtacagtatttcagaaatctttcaggtgaagcctagttctggttgctaggcaacctgacagactcccaagctgggaccacctcgcctcccacatttgaccatctctccagcggtgggacgcggagtacccattggcccgcatctcctctcacttagtcccaattggtcggagaacctctcactccgctcccgttggctctcgccgtatctcgcagctccgtcattggcaactgggctctcgtgccacctcacgtcagtctctcacaccacttcctcggccctgagactttgtccccgcctcttctccccgcccttccagccacgagggaaaatcctagcgagtcatcgcctctagtttccttttgattggtagaagccggactggggggcgggcgctgccgggcaactctaccggccgcgattggctgtgggagccaccgtcccgcctcccagcgactctcggcggtgccggagtcgggtgggttggcggctataaagctggtggcgaaggggaggcgccgcggactgtcctttcgtggctcactccctttcctctgctgccgctcggtcacgcttggtgagtgtcccgcgctggggagtagaactgggctgcggaggtgccgcgggcggggtgtgggccagacagaggcggtgtccttgactaggcccgaaggagctggggctctgggtcaggacgtaggcgtggactttgcccgggaggatggggcaccgtgagcggggccgggcgggggttccctcgtgagggacctgaggccgaccgtagcggatctgagaagatccgagaacacaggcgagtcgcggaggggagaacgcgagagggcgttgaggtctaggtattct

SEQ ID NO: 13061 - DNA, 1200 bp, Homo sapiens
gtgtcagcatctggaagacaggcgccctcatcctgccatccctgctgcggcttcactgtgggcccaggggacatctcagccccgagaagggtcagcggcccctcctggaccaccgactccccgcagaactcctctgtgccctctcctcaccagaccttgttcctcccagttgctcccacagccagggggcagtgagggctgctcttcccccagccccactgaggaacccaggaaggtgaacgagagaatcagtcctggtgggggctggggagggccccagacatgagaccagctcctcccccaggggatgttatcagtgggtccagagggcaaaatagggagcctggtggagggaggggcaaaggcctcgggctctgagcggccttggcccttctccaccaacccctgccctacactaagggggaggcagcggggggcacacagggtgggggcgggtggggggctgctgggtgagcagcactcgcctgcctggattgaaacccagagatggaggtgctgggaggggctgtgagagctcagccctgtaaccaggccttgccggagccactgatgcctggtcttctgtgcctttactccaaacaccccccagcccaagccacccacttgttctcaagtctgaagaagcccctcacccctctactccaggctgtgttcagggcttggggctggtggagggaggggcctgaaattccagtgtgaaaggctgagatgggcccgaggcccctggcctatgtccaagccatttcccctctcaccagcctctccctggggagccagtcagctaggaaggaatgagggctccccaggcccacccccagttcctgagctcatctgggctgcagggctggcgggacagcagcgtggactcagtctcctagggatttcccaactctcccgcccgcttgctgcatctggacaccctgcctcaggccctcatctccactggtcagcaggtgacctttgcccagcgccctgggtcctcagtgcctgctgccctggagatgatataaaacaggtcagaaccctcctgcctgtctgctcagttcatccctagaggcagctgctccaggtaatgccctctggggaggggaaagaggaggggaggaggatgaagaggggcaagaggagctccctgcccagcccagccagcaagcctggagaagcacttgctagagctaa

SEQ ID NO: 13062 - DNA, 1200 bp, Homo sapiens
cttccaggagaaacctgacaagatggtgctgcaaacaccaacggacacacagcactttacattcacaggctgtctcaggggcctccaacaaccctgaccattcttgccccattttgcagatagaaaaccgaggctcagagagattatataacttgcccacgatcttcctccagcaagatggaggccaagtgaaatgagaaagcaggtctcctgccacttcctttgcccagaggtcttctccccacaccagggcttcccaagggctgagatccagtcacacctgtgcgtgatcaaatataagtgtgaacaatgcaaagggagacgtcttcaatctaaggggcttcaattctgtaatgtaattctgagattatgcccttttttgttaaagcctttcctttttgaagtgatggtcactgtagatggtgagggttttttggaggcggacaatatctttacatgacaaaattaaaagttggcagctccgaattgatctctggagtgttttgaaatgcaagaggtctccgaaacctcagtctgggagccacggagggctctcccctctccccaggtttaccagtttgggaggcttggagagaggcctggaggacctgctggggactaaagaagagcactggtgggaggacagggcgggggaagggggaggggagtgaagtagtctccctggaatgctggtggtgggggaggcagtctccttggtggaggagtcccagcgtccctcccctcccctcctctgccaacacaatggacaatggcaactgcccacacactcccatggaggggaaggggatgagtgcagggaaccccgaccccacccgggagacctgcaagcctgcagacactcccctcccgcccccactgaacccttgacccctgccctgcagcccccgcagcttgctgtttgcccactctatttgcccagccccagggacagagctgatccttgaactcttaagttccacattgccaggaccagtgagcagcaacagggccggggctgggcttatcagcctcccagcccagaccctggctgcagacataaataggccctgcaagagctggctgcttagagactgcgagaaggaggtgcgtcctgctgcctgccccggtcactctggctccccagctcaaggttcaggccttgccccaggccgggcctctgggtacctgaggtcttctccc

SEQ ID NO: 13063 - DNA, 1200 bp, Homo sapiens
gacagttcctctccctccaccccaaccccacgccgcgcgcgaggctggccctttaagagccccgccccgactccctcccccctcgcgtgactgcgagcccccgcgccgggccggggaatgggtcggctgggtggctgcgcgggcctccggtccttctcacgcaacgcctgggcaccgcgcctccgggccaggtggggcggggacgggccgcctgacctctgccccctagagggatgtcgccggcgcacgcaagctagccgggggtagggtgggggctccgcgccaggtgccccctccgtggtccctgggcccgagtctttccgtggccccccgccgccggatttctgtgctctgccaatcaaagcactagccaccccgggagccaagagggaccctcaagggccggtgggtcctggctggagggaccgcgcgttgcaatcagcactaaggcgatcctagaggctgcgaggagccgctagtgagcgctcagcgagcctgccccttcgccatccattccgatccttcaatcaagaggcgcgaacctcagctagtcgcccgggctctgggggacaggtccagccccgcggcgcctctggccttccggcccccgtgacctcagggctggggtcgcagcgcttctcacgcgagccgggactcagtaaccccgggaaggaggtcaccacggggcagccccgcccccgcctgccgagtcctggtaggctgtagcgctggggaggcatctgcacgcccagcgttccagtgggtgcaaaaatgacgaagaggagtccccgcgccccaggatggagcttcccgtaccctctcttcgggctgtcctgggacttctccctcaagccccctcctcggctgggttctgcactgcccttgggacgccttggaattgggacttccaggtgttcccagccctcacccctctatgtacaggcaccgagatgtgtcccatagtgggttcttgcccacccgaccccccacccccgccgccctccgccacctttctctccaatcccagagagaccagcccggttcaggctgcttctccctccatctcagctcgctccagggaaggaggcgtggccacacgtacaagcccgcctataaaggtggcagtgccttcaccctcaccctgaaggtgacagttccttggaaccttccctgatccttgtgatcccaggctccaagagt

SEQ ID NO: 13064 - DNA, 1200 bp, Homo sapiens
cctctatcctcctcagtcatggtaatcattcactcactcattcaatcgttcaacaaatattaattgagcatctaccctgtgcctgatactatgctaggcactgaatatatagcagtaaaccaggtggcataagactgtccccagggagcttccatcctaaagaaggagagagaaaataaagacataaatgaggacactctacgtggtgtgtcaggcatgatatgtgggctcatacctgtaattccagcactctgggaggccgaggtgggaggattgcttgagcccaagagtttgagactagccaggacaacataagaagaccttgtctctatgagaaaaaaaaaatagccaggcatggtggcacatgcctgtggtcccagctactcgggaagctgaggtgggaggatcgcttgagaccaggagatggagggtgcagtgagctatgaccttgctactgcacaccagccactccagcctggatgagatagtgagatgctgtctcaaaaacaaaaacaaagcaaagtagaaaacatggataaggagtggtagagacagggttggacctgcaatttgaaatagatggttagggggtgtggaacaagccagccacatggctatctggataagggtgtccctgttagggcagggaaatgtgcgaaagccctgagcagtggggcctgtgcagagggttcaagatgcgggaggacaaggcggagcaggggaagaggtatagtcagatgacgtggggcccaggggaaagacctggggttcagtctgagtgagattaccggccagtaagggatttgggcagaggagcaacaggattcgactaaggccagcagtctgatgtaagctgtggattcgtgcacctgctttgtgtgcaaatcacctattttcctgggtaaaaccattagcattagaggctagagccgtgaagctgagcataccctttcacttaataattccatgcctgggaattcaacctggagagagaatttaacaaaacagtattcttcaggagtctcaagttttcaataagaagtttttaaattttgtgtttttaacaataaccttttaaaataatggtgaacatatattccactgtctggttgattacttatatctcaataccacatttcattccagcagcagagttaagtagtattgctttaattgcaacaagctgagctaatgtgggaa

SEQ ID NO: 13065 - DNA, 1200 bp, Homo sapiens
caagaatggcttcagaaagacaaagagtatgaattatattccataaccagaaaaaggccttgtggctggagaatggagagtgaaggatcacttgtgagagatgaaactggtgagatgggcaggtcatatagaacctgctaggccaagcagggagtgtggattttaggtgcaatgggaattcacggagggttttagcctggatgtaggggatcatgatttaatttcattttaaagatttaaagcatgataaatccaggcaaaaccaaactgatagatccaggcaaaaccaaacaaggtgagtagtctgggtgacaggagatggggccttcagcttgtgggctgagtgacaaggtcttgatggattggaggtgaggcaaagggaggaatcaaagttagctgcaaggtttttgaccttccaacttagagaagtttagcgccgcgttctgagaaagtgaagactgtggaaggaatcgtttggggagggaaggcgagctgtctaagggggggggatgtggaacatgcagtgggatgctggggcctggaacgtaggggagatgcaggtttggagtcaccggtgcctgtgttgttgggcaaagccaggggaaaggtcaggtcgccttgggatctggcctagcactgagtgcagaggaagagaagcttctgagatcgagaggcagcggctacaggaggaggaagaaagcaaggcggggaaaaccaaagttcaggagagcatttgcaggagggcgctgcggggtagggtctgagtcggagccccgaatcggactcgagtcctgtcgcgtggggacggagcgtgcagaggcccatgcgagggacagacacaaaggccctgggagctgcaggtcagaccactggacagcgcggccgcggacctaacgcccctgtaaggggtgctcacgcttggggggaactctccgaaagagaggaccactgaaagccaccctggcagcaggggcggaacagacagacgtgggtctggccgtcgccagaactgcctgcggaccagccccgcgctgccgggggggcgggacatgtcggctgtccatcagtgcccgcgaccaatccgcaggcagccccgcccccgcccctcccgggagagggcgcgcggaggacccgccgccgccggtgtgaggcggcccgtcctggctcccttgtccgggaagcccgcccaggtaactgagt

SEQ ID NO: 13066 - DNA, 1200 bp, Homo sapiens
actcctgggtttaagcaatcctctcgccttggcctcccaaagagctgggattacagacatgagccataacaccaggcccaaacctgtcttctagtgcctccaaaacctctgtcgcctcatcagctactaccctccctcttcctgtggtttctcaaacatgtcaggcacagaccatctcaaggcttttgcattttctttttcttctgggtggaaggttcctcacccttgaccctgttatgtgtgaacagaactccctctctcatcttctcaggtcttgaatcctgtcaccttttcagttaaaccctcccttattcaacgaactaaaattgcaaatcacttgtcccacacaccctctaactctcttcctggatttttctccgtagtacttattactacttgatacactatgcattttttagttatttatctttgttatggtctgtaaattccaggaggacagggacctgtgtgttgtactaccaggggtgcctccagcacctagaaggacgcctggcatatggcagggcgcaattgatctctctggagtgagtggatgaatgggagctcagaggaaacatggaagtctgggaaggcttcctggaggaataggcccgctggcccacactcccaaaccccgcccatgcggctttgcgctctgccacgcccatcgaagcggggccgaggccggaagcagccccgggcggaagccctaccgtgccaactgggccctcctcccgacctgccccgggctcgtgccccgcccacccaaaagtgggtgaaaggtcggcggcgccggcactgcagctggggctgagaagccaggacggcccgagaactgacagacggagtgacagacggactgaccatggccgaccagccaaaacccatcagcccgctcaagaacctgctggccggcggctttggcggcgtgtgcctggtgttcgtcggtcaccctctggacacggtcaaggtgcgggaggctgggtcgcaggctttggggaggaggcccgggcggggcgcggaaagcatggtcccccgcgaggcgcggacgctgggcagaagaggggcatgtgtgagcttccgtgagaagtctagggaatctctctttcaggggtgggcaggaagctgtaccttgcgccccaaagagccaggcggcggcgcaaagtgagcagcctctaactgcctgtcaagagctctgat

SEQ ID NO: 13067 - DNA, 1199 bp, Homo sapiens
acgcttctgctccagaaacaacttacggataaaaactcagcttccggtctttattgtttcgtccccggcggttcttacaacaaatcgctgcgcaatagcggggcatgactcgggtgaggcccctggagaccggggccggcgacggatgcagggcggccctcctcactgaggatgcgccacaggtccaggcctctcgagcccctgcgcctgcgctagcattctgccgggaaagccgcctcgtctgtcgactcacttccgcctcctccggtttaagcaccgccttttcgggggttgaagccggaagtggcgcacagccctagcagcaacaacagttttccacgtgcgcgtagggcgccgggatcacgtggggaggcagaagccaatggggaagcgtttcgtgtaggtcttctgaggtggtggcgccagcggctacctcctgcctgtgaggagctggctgagaggggactgggcgccggcggggaaggaggagcgctaggtcggtgtacgaccgagattagggtgcgtgccagctccgggaggccgcggtgaggggccgggcccaagctgccgacccgagccgatcgtcagggtcgccagcgcctcagctctgtggaggagcagcagtagtcggagggtgcaggtgagggacgaggccggggtcgtggggaggggagttcggagggtccccgtagcccaggcctgtctttgtgagctgacttggcctcggtgtccgccacggtcgccgcagggacaatgggctgcatgtttttggccgagagaatggaagaacggagacagccgcatcacagaatcgtgttttgggttgtggcgccggctttcacgggcgccggattagagcccgggtctcgggcagcttctgcggcggggcctgggcgggcagggaaagtgccagtcgcctttaggtgaaggttggagggtctagcccagccgcccaccgaggctggggaataaggcacgggctgctggctggcggggccgtcttggggatgagaagtctgtacaatacaaaactagtctgctaaaaaaaaatcattagatgtccaccttgagaccgtggaataacgtctgctgaaccagtgaggcgcctccctgtcagttttagatccgccctttgactagggagcaacctgcagttgacgcagcgtccatgggacacactgttgtgttccttaaaccga

SEQ ID NO: 13068 - DNA, 1199 bp, Homo sapiens
agggtaggctctttggagcagctgaaggtcacacatcccatgagcgggcagcagggtcagaagtggcccccgtgttgcctaagcaagactctcccctgccctctgccctctgcacctccggcctgcatgtccctgtggcctcttgggggtacatctcccggggctgggtcagaaggcctgggtggttggcctcaggctgtcacacacctagggagatgctcccgtttctgggaaccttggccccgactcctgcaaacttcggtaaatgtgtaactcgaccctgcaccggctcactctgttcagcagtgaaactctgcatcgatcactaagacttcctggaagaggtcccagcgtgagtgtcgcttctggcatctgtccttctggccagcctgtggtctggccaagtgatgtaaccctcctctccagcctgtgcacaggcagcctgggaacagctccatccccacccctcagctataaatagggcatcgtgacccggccgggggaagaagctgccgttgttctgggtactacagcagaaggtaagccgggggccccctcagctccttctcggtcttgtctctctcagatgtaactgagctgtgggctaggaggaaaaggccgggaggaggcacggtgatgactgaaaaacctctcccctctcataagaccagtcatccggacgcgggctttcccccactcggtgcccacctggggtcttacaggaggagctgctcctcctcagcaataggacaagatggtcaggtcttcctgcttccgctgagaaaagttagggtcctcaggaacggagcagactggtacaggaacagagtcatcatggccaagagtccaccgggtcctcttgccatcaggaggaatagcagggcttgtgcaggaattggggctggagggaagggccgggctcggtcagtctccagctgggatccccagagtggtcaccctacccctccctcgagacagactgcctgactgtgtgtcatcaggctggtcaccatctccctgaacctcgatttgctcacctataaaatggaactaataacgatgcctgggctccctgtctcaggggctctggtatagctgaagagaactaatataacatgaaagtgctttctaagctttgggataagctaaaaggcagattccaattttattcgagggcagcgtagattggtgcttcagct

SEQ ID NO: 13069 - DNA, 1199 bp, Homo sapiens
tcactttctagcctttccacaccatcggaatattgcacagaagtatgtcagtcacaggagtgtaaagaataacatttaaactatggtaatattttcattcagtaagtttctcccctttccttccttgggttagattcagtgcctgatttttttaggccctggggcgcaagcatccactttctcagaatcccattcaccagaaaccacccatttaacttgctctgggtgcgagcagcgcttgtgactgggcaacctgtgcgtcagcgtccccggtgcttcggcgctccggccagtgacggcgaccaaacccagctaggtcagacgaggtactgatcagcccaatgagcgcctggtgattctcgtagttaatcactctggttcattccgttcgatcccggaggcgggagtgtttggcttgtccctgcgtgtcacggcagggtgaccctagccccgagggagggcggtggtaccagtcctgctggcggctcagcgcggcaggacacgtgtgcgctttcagccgggtcgcagggcgcttatcgcggcccggcagtcggggccacgcctcacccccgcccgcgaaccccgacctggggaaacccggggcgctggggaggggccactgcgttcagctctggcggtccacagcccgaagcgcggcttaggaagttcgtgtcagcgctgcctgagctcgtcccctggatgtccgggtctccccaggcggccacccgccggctcccatcgtgacctccagccgcagcgcctcccacgccggccgccgcgcgaggggagcgctcgggcgcgccgggtgtggttgggggaaggggttgtgccgcgcgcgggctgcgtgctgtgcccactcaaaaggttccgggcgcgcaggagggaagaggcagtgcccgccactcccactgagattgagagacgcggcaaggaggcagcctgtggaggaactgggtaggatttaggaacgcaccgtgcacatgcttggtggtcttgttaagtggaaactgctgctttagagtttgtttggaaggtccgggtgactcatcccaacatttacatccttaattgttaaagcgctgcctccgagcgcacgcatcctgagatcctgagcctttggttaagaccgagctctattaagctgagtgagtaaattgtaaaaccagtttcgctgagagtgtgtgtctggaaaggttggt

SEQ ID NO: 13070 - DNA, 1199 bp, Homo sapiens
taggtcttcatggggaaactgaagatcagaaaggggcagtggcctgcacaaagtcacaggttagagtttggaggacacaggtggaacagcacttgccaggcgctgcagtgtgggtggtgacatcgtcagggcccgctgggctcacagggcctccaggcaaccgggggcctttgggtccccagttacacactgtggtcacatcagccaggctgacctgagggtcactgcaggaccagcctctgctgagggctggctcacctgcatggagggggttgctcccaccccaagcatgagtctgacccacgcaccagctcactctcccctcaggaccaccgacttgcccagtcactgaatggagaccacctgctgtggtcaccttgccaggcccttctctgtagacacaggagaccgatcttgaggagccagaggcagagcccagctgggagccggggtttcactggtcagtcggtcagtctctgcagctgcagcctgagatcagccaagcccctcctgaggctcctacctggctcactttgccctttctccacaggggtctgatctctctgctctgcttttccaaactatttctctttctctctctcgctctctggttctctctctctctctctctctctctctctctctctctctcatcagatggctgactggaggcagggtcccagcccaaggatggggttggggtggaggtggcgaacctgggttggtccccactggatgctggtcctcactctcatggcagacggctttctttgaggccaggactgggtgatggtgtcgctacccccgccgcagtctgacgtcacgctgccgggccccaccagactggagggcgagcgccaaggggacctcatgcaggcaccgggcctcccaggctcccctgccccacagagtgtaagtacccggcatctgggcctgggtttaggccaaggcctgcggctgcccaggcaacaagaagaccagtcaccttaccgcccccagggacctcccagggcctgtcttgtcccctccaccagcaaacaagtcctcagggaccccgagatccagaggggtcactcctcatcccttcagtctgagcctgtcccagggctgtgagccccatcagatttggggtaccccaggtttcatggcagggtgccctcatgaaatcggggccaagggtaggctatttcttctccacc

SEQ ID NO: 13071 - DNA, 1198 bp, Homo sapiens
gcatattatccccattgtaccgatgagaaaaattcagagtttcacctgcccaaggtggccaagctaggaagtggcagggctaggatttgaacctaagttttctaactccaagccccatactcctgcctccacagcagctttcgtgtactctcctcagtgtagggaagtaagctttgcctccctatgccgttacatggtagtggtgattaaatgagataataccttaaagagcctggctcggtgagcactcaatatattatgtgaagggtaaactgaggccagggagagtaaatatttcctccaaatcaaacaccaaactgcaggctgtagacacgactttggactagccccagactctccttgttgagacaacagctttggcggcctcgcaagctccgcacccccggatccctccggggcccacacgcagtctagccaggcgccaccacttgggcagcgaaggaaggaaacgcccttcaaagggaccaagggggagtggtcacccggcggggcaggggcggggcgcaggcgcgcggtcgctggaagatgacgtagccggggcgtcaggctctgtgttggttggagcgagcatgtgggtctgcagtaccctgtggcgggtgcgaacccccgcccggcagtggcgggggctgctcccagcttctggctgtcacggacctgccgcctcctcctactccgcatccgccgagcctgcccgggtccgggcgcttgtctatgggcaccacggggatccagccaaggtcgtcgagtaagagacggcgccgaagccggggaaggggactggggtttctggaaggctttaacacgagctgcggactgggaagagagggacagggtccgaggaagggggcagagaatagcaaaccgaagccgaagcccagggcgtttttggtaggtcagaaagaccgtacttgaaggtagctgaagacccgagaggcaattatcagggtattaatggctgatgtttattgatcgaatattgtgtcaggcaatcccttgtttaaatggatgctctcatttaattgtcacaacaatgttttggggtagttattgatttatccccattttgcagatgaaaactgaggcagaagaggtaaaatcactcgtccaaggtcacacagccagtaagtgacagggtcagaattccaacctatgtctgactgacctgcgtgagttctta

SEQ ID NO: 13072 - DNA, 1198 bp, Homo sapiens
tgcaggataaagttcacttgttgtttattctcagtctgattaggccaccattgaaaacagaatgtgaactactgtccagaagccctctgtgaacttcaggtctgccttaggagggacgcttccagcgagggagcgcgtgatgaagtctgcaggcattgctggggcaacgctaagtggccgctggccagggtagaagttaaaccaggagatggctgtcaaatgcagttgttaggtgtggcacatctttctcaagctgctgagctgagcaggaaagagagacgtttgtttatggatttatctcatctataagacactcttattagatgaactctatatcagttctatgtagaactctgtaccagttctataaggcactctttaatctgaatctttttatttgctcaagagaaaaataagtctgacttgcatcccattgaagatttagattgcactgtttacatctttcacctgcgccgcggtagcgtcctctaccgatgctatcctacgttgatttttccagcaacctgggaagcaacctcataggtggtttgggatgtcttttggctgtgcttaaaaatttccaacagatttgctacacatcttaggataaatatgtttcctgtgaattgtgatgatttcttacagtacatttgcaagcatgtgtatgcatctgcaggaaacatagcctggctctgtgaaggaatactgctgtgaccgcaaaactgtttctgtagaattttctccggtgtggtcatcctgccttcaggtcagtgaatagatggtgtttggacagcgtctggcacagatactttaaccttaaagcttaatgtataactggtattttttcccccttctgtgtcagcaattggcaacgggacactgtaaataaggattctggtttgtaaatggacgtctgttcctccaggggaggggaaggctggagtaagcagttttgaaattcatgctgcaagtgataagataatttgagtaacctgtaagacctgtggattcacaggtttcaaaaacaggaaagtctcttgtttgaaaaccctctaaagcaacatgtgggcttagaaaagaagccggcttgtggtttggtgattgtacttccttattgatataatggccgctgacgcaaggcctcctgggattgcagcgcggtgaccgcaggcctgacggttaccctgaccgggttctg

SEQ ID NO: 13073 - DNA, 1198 bp, Homo sapiens
ttctgttccaaatatccagacgttacagttcccacaggtggccaggagaatgctggaacctttggcggagacggtctggtcttgtcccgcagcccgcgagggtcccccgctatttggggtcaagcagatccccggggcgctctggccaccccttgcggcagctggtgcggcctcctcggagagctccgggccggcgcccgggacaccccgccgccctccctgccgccccagggacgagcccagcggtgcggagaagtgggaggctggagcctgctgaggtcatttcctgtgcctctccgcgagctgcctggagagctgagcccagcgctctgcctttaaggagcgggcggggagccgaggggaggagggcgcccggcggagcgttgaatggggcgcagcaaggctcggccgggctttgtgcagcgagcccgcgggcacccctcccgctccagcctcgccccgccccgcagcccacgacccctgctgccggggaggggagaaccggcggcagcccgggactccggcgagagcgacgcaaggtcggctgcggcggcggcccgagggcgcccgtgtgcccagtgcgcggcggggacggccgcgagctcgctggaggtgagcgacccgcgctcccgccgctgtggtgggctggggctgcgccgcggcggagggcgtcaggctgcgcgcgggggacggcccctcgggcccagaggacgatccggagcaggtgcctccctacctggaagcgagctcccagcggcggggagcgctggagcgcgggtctggcttgggaagccgggcgccccaggggactcgcgccgcgaggccaggaggagcctcccccgggagtacctggacttggggatcggtcagatccagccgctcctgggaagggccctcggagcggacgtgcaggctgccaccttgctatcggtgctcgctccctttcaccccttcccgcacccctccccatctcacctcaggttatttcttctgtgatttctgagtgttgtctttgggaccctatggctcaggctcgactcctaggagcaggtcattcaagcagaaaagaaaacaggttgggcgccgaatgacacagagcattgtgtcctaggagtcttagcgaggactcggtcaccaggaaccaggggccttagtgggggtggcagaggcggtgaagagcctcatctggaaggaaact

SEQ ID NO: 13074 - DNA, 1198 bp, Homo sapiens
ccctcaaacactgagaaggtgaccgcggagtggagaggcctggggctacggacccctgccacaggaaggacccacccccatctccggacagggctacctcagccccagctctgtccgggccgaggttctaggaaccctgaaaccctggcccggccgcaggtctcccaaggccggcctgcttttctggccctcaccagtgccagttgttgacgttggtggcgtccgcccgctcctccacgatccagcgtgggtctccctcaccccacttggccatcggctctcctatcgcggcgccaccagctccggagcagccgtagccacagcctcaggaccgcttagtgccagccgcccggcagcgcctggaaactactagaagcggccgcaagcacctcctggcttgcttttccctccaccccctcccctccttaacttccggctcctccccactcccaccggttacttccgtcccaactcgccgcaccgtgggttccgcctgatttagagatccttcagactccatcgggttctccccaaaaagcgtcccgaaacccaactgctcatacaaccattcctcacccataggaaaacaaagaacacgtctcattgcttccctggaccctaaatcgcccttgctgagcctcatgggaattgtagtcttgctacgtgactcgctggataaccgcggaaggtctcgcggaaaggagaggaaatgacctagcacggtgcttggggtttctgggggctgtagtcaagaagccttgtggttcgtcgggacagcgcctgacagcagaggcagaagaaactacgacttccagcatgccctgcggtctcgttattcgtgttttctctccgccctacgattattcccttccgcccccttctctaagctgcacagcctgaatagaagggctggtccagcggcggcggaggctggcgctgtcctgagagggagggctctgtgcggaagaggtgagggtgtcccaagccccttgggtcgcgtatctggctggatccagcctctccgcatcttgatcttttcccctcttctaggaggcatccctacaccctatgactacaggcctgattctcttctttcagtcagggcgacccttgggcgctggagtacgcttgggactggggctgcgagtgagcaccagcgattggttcggaagcggacatttggttcagaacgagcatt

SEQ ID NO: 13075 - DNA, 1198 bp, Homo sapiens
tggttagctctgaaccccatctaacacggtgccttccccccacttgcaatgaccttgttgcattgtatgcactctacttttcacattgtagaggatcttatttatttacttgtctccactaaaatggaagcttcctaagggaaaaggccttgcctgtcttgttctctgcagttaacactggggtccagcactgccacagagcctctaaatatatgtgtgttgcatgagtgaaatctcagagcctgggttcaaatcctggttgcaccacttgctgtgtgacctcggacaagccacttaaactacacctcagttttcctgcataaaaatagtaattattttcagttttctcactagaaaaatatggattagtaatcgttcctctcttatcaggctaagaggatcaaatgaggaaatatccgggaagcattaagcacactggctggtacagagcacacgaatgacaacagcaaacgtttatgtagcacgacggccaggaactgatcaaaatgcatcacctatgttaactatgttaatcttcactagattttacgaagtcggactattatgccattttacagatgggtaaactgaggcccaggagttaaataacttatcactgttattttacgtctaaggttccttccaagctccccgtgggcgacccttccgaaggaccagaaggcgcgccaggccagcgtccggcccggccaggacggaaagggttactaggcccgcgcgcccgttaccggcggaggccggcgggctcacaatgccaggagccgggcgccggacacttcttcgcctcccatccgcgcacacgccccttcctgtcacggctgggcccggccccgcccccggcaccgcccgctggccgggcgctgccagagtggacggttccagaggcatgctaatgagggggcgggcaccgcagcccattggttgtccgcggagtgtcggtgaagtcagcgctgagtcccagaaaaacagagcggggccagctgcagcgtgtagtgcgagtggggcggacgcgcgcagcccgcccgcccggcgaccagcaaggtaagcccgcgctcgcccgcccggccgcgcttgcccgctcggcggcggcagcgccgggggtgtgcgcggctcggcccccgcgggcggcgcctttgttccgcgctcggaggaggcgcatttaaagggccagctgttggag

SEQ ID NO: 13076 - DNA, 1198 bp, Homo sapiens
ccaggattgtttcataaagagggatgtggttggtctttaaccctatgaatgctggctgaggatgcctgcggaacctgtagtgaagctttcaggggctgctcgggttctggctggtaggtgaacactgtccatcttgccggctgggacacagtgactctgggtagttgtgtaagagaggggcccttggcagacaaacaggttcttctctgttggtgggccagccagcaggtcagtgggaaggttaaaggtcatggggtttgggagaaactgggtgaggagttcagccccatcccccgtaaagctcctgggaagcacttctctactggggcagcccctgataccagggcactcattaaccctctgggtgccagggaaagggcaggaggtgagtgctgggaggcagctgaggtcaacttcttttgaacttccacgtggtatttactcagagcaattggtgccagaggctcagggccctggagtataaagcagaatgtctgctctctgtgcccagacgtgagcaggtgagcagctggggcagagggatgggggtcacagtcctaagggagggcattgcaggtggcctcaggggagagcctggggtggcccctaagacgtcctcttggaacattttggcagagttgcctcttcgccctcattatggctcagtttttccaccatgaaatgggagggagggagacaggtgggcaggggagaggtggtagaagtggcctagagaactgttcctggggtctgggacctttgcgaaggggttagagcaccacgctccctgctatgtgactgaggtagcaagagcacgccctcttcccatgtctgaggaagacaccctagcctccttgactcacctaggtcagtcctcttgagccccaacagctctgtgctccccagcccaaggaaggggtaacaggatttcgggcagttgcccctgcagaggccccctgggcaagtcccctgcgccatgtcccttcgtctccttcttcccctaaccaggcctccctccacctgtcttctcagagcaggtaatggcaagcatggctgccgtgctcacctgggctctggctcttctttcaggtgggtctccgaccctgacttcaacgtgggggtgtgggtggaggctggccagagggccctgtccaccctgggggaggagagcccaggccctgattacctagtccctctc

SEQ ID NO: 13077 - DNA, 1197 bp, Homo sapiens
ctggcctgaatcccacaactggcgccccaccttgtgcacccgcacccgccctcaataccggcgggcagctcctccactgccgcagggttaccagctgcgtgtccgaggggcagagagagaaacagagggggacggggcaggcgcgctgggcccgcccccccgtgcctggggcagcttctcattggtgaaacctcctccccggccgcccgctgcttggaaaatcagcctcggattggctgacagccccccgacgggcgtggcttccgaggagagggcaagaacggaagcgagggcgcgctctcgagaggaggggttgcctaggcgacgccggaggcgcgctcggggggtgggaaagcgagcccggcagctcaatgacaaatcggtggaggacggctggggtccggccccgggagggggcggggcgcgtttaagagctgcgggccgggtgcggacggcggaggcggcgggactggtccctggtaagggcgcggcgcccgcgggccccgggcggggtggggcgcgggctggggagtggggtacgccgcacgcccgcagcctcttgctccctccgtgccgggctgtggccgggcggcggcaggacatgtcgcgccccgaggccggcggagggcgacgccccggcagcggccccgctccgctccgggaggactccctgggggagtctcggcttcctgggctgcctggggctgaggaagtgggggcggcctccgcctctcccttgtagccgcggttccttccctatcccgcagatggctctgcttccacttcctgccgcgggcctcccgctcgggaccgtccacttcctcagtcctccggccgcggcttgggcagggtcagggctgggaagtgttgcaaaaacttaactgccctcggaacttgcacgcgccgtgaactgggcggtgttcctaaagggcttcggtttgctggttttgttttggtcctgtcttgcaaatgagcataaagttgtttctcccccagcctcctcccctttcctttctgataggggccagcggcgaaggggcttctaaggggaagcgcctggactgggcatcgccgtcccggttcttgccgcctgtgggagtgtgaggttaaccgtgctcggtgcagggttgcggggcgcggagcttgctgcgtccacactgcttgtgtgagcagtgtcctctctgtgctcatttccaa

SEQ ID NO: 13078 - DNA, 1197 bp, Homo sapiens
atgtgcatgcctcttatccatttaaaaatagctttactgacctataatttacacactatataattctcccattgaaagtgcataattctgttgcttttagtatatttacagagttgtgcagcatcagcataatgtaatctagaacattgtcatcaactacccccaaatctctattcttcccttcccctattaattacccagccccaggcaagcactgatctacttttggtctctatggatttgtctatttgtggacactttaaatggaatcatacaatatgtgtcttttgcgactatcttctttcacttatcataactcaatacggctttagattatttgacctcgatgttctgcctctgaacataaaatattatccttgcattccttgatgagtttgaggattgagaataatttgcatgagacaaaaattagaaactagttagagcaagtaggcttttctccatcacataagctgatccatcttgccaatgttaaaacaccagattgtacaagcacaagctgggacgcaatgtgtgtccctctatccctacattgactttgcgggggtggggatggggtgcggggtgagtgagggaggactgcaagtgacaaacaggattcgtcaaaagagaggtgtattaaagtgccgatcaaatgtaatttaacagctaaactttccctccttggaaaacaggtgattgttgagtatttaacgtgaatcgatgtaaacctgtgtttggtgcttagacagggggcccccgggtagagtggaaccccttaagctaagcgaacaggagcctaacaaagcaaatttttccgtctgccctttccccctcttctcgttggcagggttgatcctcattactgtttgctcaaacgtttagaagtgaatttaggtccctccccccaacttatgattttatagccaataggtgatgaggtttatttgcatatttccagtcacataagcagccttggcgtgaaaacagtgtcagactcgattccccctcttcctcctcctcaagggaaagctgcccacttctagctgccctgccatcccctttaaagggcgacttgctcagcgccaaaccgcggctccagccctctccagcctccggctcagccggctcatcagtcggtccgcgccttgcagctcctccagagggacgcgccccgagatggagagcaaagccctg

SEQ ID NO: 13079 - DNA, 1196 bp, Homo sapiens
cactttgaaggctttcttgcctataccaggacaaactcagctctttatcccttttccgaattttcctggtactttcactttgaatatagcgcttaattaacattctgccttgtacctaggactaacacactataaattcccagaagacaaagtaggggaatacaataacaggatatagaattttaacagctaaattagatgaatttatgggtgacctttattgggcaaaagaaaatgttaagttagtataagatttagtataagctaccatctcaaaactcagggtctcactggaagagaaagtgactccaggtagaattcctcagggagacattcacttccatcattcgctgaaccaggagctttggacagcctcggattgcacccgcatatccaaggacaccacatcagcggacaagtcataaacagccttgggaatacgcggaaaggtcaaatttacctaaacaattaaattctcttttaaattttaaggaaacacaagtatgctttcgctttaggtagggcatttgagagcaaaatgtactaatactttgaatccgccaagcagacacgatctgggtttgaccgttctctccgggtaaaggtgaaggctgaccacgggggccgctctccctccaggccccagccacgccctctaacccaggttcccgtcctgcaccgcgccgcaagtccccccaccgttcagcgcaaccgggccctcccagccccgccgccgtccccctcccccgccctggctctctttccgcgctgcggtcagcctcggcgtcccacagagagggccagaggtggaaacgcagaaaaccaaaccaggactatcagagattgcccggagaggggatgcgacccctccccaggtcgcagcgacggcgcacgcaagggtcacggagcatgcgttggctacccggcgccggggaccgctgccaccccgcctagcgcagcgccccgtccttccgcagcccaaccgcctcttcccgccccgccccatcccgcccacgggctccagtgggcgggaccagaggagtcccgcgttcggggagtatgtcaaggccgtgacccgtgtattattgtccgagtggccggaacgggagccaacatggcagcggggttcgggcgatgctgcagggtgagagggagcccagcggtgcggtggggctggaacatgggtattgtggtgt

SEQ ID NO: 13080 - DNA, 1196 bp, Homo sapiens
aacaccatgcctgacaaacataataaaataaagatgcagaagtaacctgcccaacatccctctgctaaaagcattcaaacccaggtccgtataattataaaggttatgttcttcccactgcttccttaaaagatttattggaggactaccctaggcaaagcacttgccctaagcactctaaattaattattcaactctctcaacagtactttagtattggtattgtccctgttgtacaaataaagaagttgaggctcggccggggtggtggctcacgcctgtaatcccggctcttcggaaggccaaggcggacggatcacgaggtcaggagatcgagaccatccttgccaacatggtgaaaccccgtctctactaaaaatacgaacaaaaaaattggctgggcgtggttgcgcgcgcctgtagtcccagctactcgggaggctgaggcaggagaatcgctttaacccgggaggcggaggttgcagtgaaccgagattgtgccactgcactccagcctggtgacagagcgagactccgtcccccccccaaaaaaaagttgaggctcaaaaaagttaggtaacttgtccaaggtcatgcagccctagaataataagggaaaacagtgtgtcccaaaatggcattatttgtccgtggggcaggtatgtttgaatttccatccatccatctatctatctgagactggggtctcgctatgctgcttggactgttctcgaactcctgggctcaggccatcctcctgggatctaccggcgcgcagagactacgggcgcgcagggactaccgaggcgcgcaaccgtgcccggctccccacctcttcaagaaatggagattgcaatgcttgtgccaactagtaagcttacacagttgtgagcgaatactccacgtgagaggttataaatgacgttgcactaagggagggatggatccttaacgcaagtcaggccacaaaagcgtaccaaaacgcaactgtgcgtctgcaccagcgcgcctgcgtgcaaaggccagccgaagcagagagcagtgcacatgcgtgcagctaccagcatatgggcgtggcgaatagcgccggctaggtcttccaacctctaggtggggtgccagccggggcgggcccagcaccccggccgggcagtactttttttttttttgcatacaccagttctcaggatatcgga

SEQ ID NO: 13081 - DNA, 1195 bp, Homo sapiens
ccagagacacaggttcattttcagttaacctactcggagaaaacctactttatcttatttaaattagggtcctccaagcgatcttaacatctcctaagtcccaagcaccctgtttttttcctgatactttttccgtttaccttaaggtctgtgtcaacctgacagtaagctgcacgatggcaggggtcttgcctactaggttccctgtgcacagcagcccgtcaacagtagttgaataaacatcataggtcacaataaccctgggactgcctcttggggaggtagccgcaaactctcgcaggtggcagtgacaccagtacttctccggggggttgttcgagtggaggaatactcttacgtgaaagtgctcagtacaccactgcggcaggaaggaggaagggaagaattccagatggggagaaagtaatattttgcagcacagtacagggtaaactgggtccaggtgggcgtagccgccgcgacaccttcacgtgaccgcggacagcttaaggaccccgcatccagtgcgcctgcgctggagctcccggaagttgccggacccggaacgcaggcggagcgcaagtctgtcagccagtcagtccgccagtccgccagcccagtacctctctctcctcggccctcgtaagctgtccgcggtctgtttggcccgaacggcggcggaggcgctgatcatggcgacattcatctcggtgcagctgaaaaagacctcagaggtggacctggccaagccgctggtgaagttcatccagcagacttacccaagcggcggggaagagcaggcccagtactgccgcgcggcggaggagctcagcaagctgcgccgcgccgcagtcggtcgtccgctggacaagcacgagggcgcgctcgagacgctcctgaggtgggcgcggggctgggagtgggtaggttgtctgccagccgtcgctcgccgctcctcttcccgtctccccccttccttcaatcctgtaacctgggcggagccgccccgtcccggcctgaccaggcgcgtaggtgtggtctgcattctttgctggtgagcaggacccgccctgcaggcccgctgtgactgcccgcttgtcctgcctgcacgtctgctctagcccttggtcggcgagggctccgtggatcagatacctgggagcagcagtctgccctgtactgatctcttttgcca

SEQ ID NO: 13082 - DNA, 1195 bp, Homo sapiens
ttagatcctgaccctcctcagtggcaagtagtgagcattcacttcgtacagaagtagcactaaggcaaattaaaagaaaggttcacatttcctctaaaagaaatggtttttgagtcatgccaataccacttactcaatgtcctctgtactatactattctctgacagagccacttattaaatgtgtgaactgtgctgacaacacttgacaactttcaacatgagggaacagcaggatcacttaacagaacaaaatcgtaaaataatgtcaaagcttgatttcaggtggtgcggtgtagcactgctcttcacgaaatcaggactcccccgaccaggcagggccgactaggttagagtgtcctgccctcactcacctggcagggcttgggatgagctggacgtgactgccacaggcatttctgttcaaccttgaagccttcgctacaggagaccgcctggcagtcgggctgggaagcaaatctgagaaacaaagagagaccaggcggaaagcccttgggaccaggaaggagagatgagattctggtttggcagtggcacctggtacccgctattaataaataataggactgtctgacatttataaggcactttatcggtaataacagtgtcatctccataagccattctattagtggtaacaaataatagccccacgcctgcaatatctcctttaatattcccaacgtccgctaagcgcgtctcatcaccatttaaagaaaccgtggctcctagaggtaaagtacttcggtcacaacgcgaggaggtccagacttgaccccagacctccagactcgagctgggaagtggccgaggctcctggtgagccgcagggcagcctgcccagccccgggaggaccgcgtgggagggccgggagagcaggtggctgccccccacaagggggcgggctcagccggccagtcctgcccggaacccccggcaacgcgcatacgactacacctgctccggagcccgcggcggtacctgcagcggaggagctctgtcttccccttcatctcacgcgagcccggcgtcccgccgcgtgcgccccggcgcagcccgccagtccgcccggagcccgcccagtcgccgcgctgcacgcccggggtgaaccctctgccctcgctgggacagagggccccgcagccgtcatgctttccgccatctacacagtcct

SEQ ID NO: 13083 - DNA, 1194 bp, Homo sapiens
tttttgagatcacgctctgtcacccagggtgaagtgcagtggcgcgatctccgctcactgcaacctctgccccgcccagggtcacataattcccccacctcagcctccagggtagctgggactacaggagcatgccacgacacctggctaatttctgtattttttgtagagacggggttgcaccatgtcgcccagggtggtctcaaactcctggactcaagcaattcacccgcctccacctcccaaagtgctataattacagctgtgagccactgtgcccagccttcttcacaatttcaccacaatccgtaaatatatatttatttatgtgattatttgttcactgtctgttttctaagttgtaaactccaggagggcagagccaaggtcaatcttgatatttgccctccctcactcccttccacccactgagaacactgttgggtaatcagcaggtactcaataaatgccagatgaaatgaatgagctagtgcatttagtaatggaagctaccctgtttattgggagtagctttgaatcactactgaaaatctggataagtgctattaaaattaggacctcaggtaggtgcctcaggtatctcagcccataggtccttttcttcaagcctcacctgccactctccacctgtaacgtgtagttttcatccaaataacctgtgctcctggcaatatccctaacaatcccaaactaaataaagaggattgtgacatggaccctaaatgtcgccacgtttgcgtctccatcccggaatatgacgctggtagctcattagctccattcaagcctacaaattgcatcaccctcctcctctgcccagacctgggggctccaacacctttcgctaggtctggctctggcctctgagcgaaccttccgtacagtatggcggctcccgaagccccgcccctggacagagttttccgtacaacatggctgtctacagagtgcgattcccacccacttccgcctagctaccggaagtttctatttgaaacccaggcggccgacttagccggtggcacgacagttgctgcagggaatcttttaaacgagagcgagaaggactgcgggcaggaccggcgggctcctgggttcggctctcccggggcgagggactgggctggatgggaggaaggacggaatgagctgggaaaggaggattttctcttt

SEQ ID NO: 13084 - DNA, 1194 bp, Homo sapiens
cagctcagatggcgacttgtgcgttttcagcggcatctcccggagaaaaagccatgcgcgcctgattgttctgtggccccaaagctgcagcgggggtgtgtgtgttggggtgtgtgtctgtgtgtgtacagagacgtccacactaactcgcggctgcaggatcagcgtctggaagcagacgtttcggctacagacccagagaggaggagctggagatcaggaggcgtgagccgccaagagtttgcagaatctgtggtgtgaatgaactgggggcacctgggcgcacagatcgccccccttcccccgccccgggccacagttgagtagtggtacatttttttcaccctcttgtgaagaatttctttttattattatttgtcgtaaggtcttttgcacaatcacgcccacatttggggttggaaagccctaattaccgccgtcgctgatggacgttggaaacggagcgcctctccgtggaacagttgcctgcgcgccctcgccggaccggcggctccctagttgcgccccgaccaggccctgcccttgctgccggctcgcgcgcgtccgcgccccctccattcctgggcgcatcccagctctgccccaactcgggagtccaggcccgggcgccagtgcccgcttcagctccggttcactgcgcccgccggacgcgcgccggaggactccgcagccctgctcctgaccgtccccccaggcttaacccggtcgctccgctcggattcctcggctgcgctcgctcgggtggcgacttcctccccgcgccccctccccctcgccatgaaggtaggtgttcagtgcgctgccactttttttctttacttccccccaccccctgttggaagttaactgagttcccttcgcctcttcctatccctccatttccccaaccgcctgaagaagctggaactccagcgtcgctggcaggaacccctaccccttcgccctccacgccgggcgcactgcctcagtgtcccaggagatcacttctggtcgcaccacccgttctgcaaacaattttgatttttgagaaaaagtggggaagagcgatagtagacaaactgagtgcggttcactgacgactttccttttgctctgagaacatcgagtgtaatttactatgtatatttcagtaacaggataatgattcaattcaacaaatatttaccaagcgcc

SEQ ID NO: 13085 - DNA, 1194 bp, Homo sapiens
gctgaaaaggccagtactcatgtcccgtttgtcccatcgcccgatggcaatgagggtgcatggacatgaggtgggctcagcctctgcagctcatgatacaaataagcagggacaagagaatccattctggtggtggtggccatattctatgcccagggaaatggtggctgcagggtccgcatgcagtgctacccttgataggggtgcaaattgcccagtccagcctttggcagcagaatccttacaaaatcatttctgtgatgtgattgtggctgtggttctagctgtttgtcctgtcctgtctctgtctgttttccaagcctgaaaagtctgtgatccagtcgatatccttttgataaatttcttttttgctcaaatcagtttccattgcttgcaattaagagcgctgctatgaggagctctgcctccctgcacagagctgattggaccagagatgcccacttgactcaggataggccaatcagattatttctcttctgactcaggttctgagagctgtgttgtctgcgtgcacatgggtgagccggaaaggagacctgcagagaatgaaacagacacataaaggaaaggtatggggtagaagaagggagggaagggttcctgacgtttttcagattctggttctagttcctcatgaacctagactttgtgtcctatccctgggctccttgagatccttctgcattgttagaatattaggttgcaccatctgaaattgttgtttttataggtcaaaaaggtcaaatatcagcagttatacatgctgatggttcaactttataaatcaccttttttattttttaacctaagctagctcaagtaggttttgcctgcctttctctttctttctttctttctttctttctttctttctttctttctttctttctttctttctttctttctttccttcttctctcttataatttttattacagggtctcattctgtcacccaggctgaagtgcagtgatgtaatcataactcatagcagccttgaactcctaggctcaagtgatcctccagcctcagcctccctattagctgggattacaggcacgtgccaccatgcctggttaattttttaaattttttgtagagacacagtcttgctatgttgctcaggctggtcttgcactcttggcctcaagcagtcctctcacctcagcctcc

SEQ ID NO: 13086 - DNA, 1193 bp, Homo sapiens
cctcctcctgccactctccgccccgctcgggtcccgccccgctagctcccccaggcccccccagtcgccccagcttggctccccgccctgcgccaacggcttccatcgcagcctgggcggccccgcgcccaccagcgggcggcgccacctggagtggcctctacgcgggaaatctcagggccagctgcgccccaggagcctttgtgtgcccaagcactgtcggggccccggggcgggggagcggctacttttagggattcctgatctcgccgcaagaactggaaaaaatttagcatgccaaagagcctccactgaggtggcaatttgtttgcgagaacctaagataaaatttaaacaaccaaccaggggcgctgtgaggcaaaccgctgccactacactggctttccgggaagcaagctcaagtcgcggagagggaagggaggtcgtgcgctcggggcggggcgcgctcccaagtcgagcgcagcggccggggcaggttgtaccgagcgtggttctggggacaccgtgcggcctcgattggaggtggctgtgatgaagcgcggttaccgcacaatggaaacgtgggcacctccgctcccatgaaagcctgctggtagagctccgaggccggccggtgcgcctggacgggagtccgggtcaaagcggcctggtgtgcggcgcgccccgccccccgcaggccccgccctgccaggtcgcgctgccctccttctacccagtccttaaaacccggaggagcgggatggcgcgctttgactctggagtgggagtgggagcgagcgcttctgcgactccagttgtgagagccgcaagggcatgggaattgacgccactcaccgacccccagtctcaatctcaacgctgtgaggaaacctcgactttgccaggtccccaagggcagcggggctcggcgagcgaggcacccttctccgtccccatcccaatccaagcgctcctggcactgacgacgccaagagactcgagtgggagttaaagcttccagtgagggcagcaggtgtccaggccgggctgcgggttcctgttgacgtcttgccctaggcaaaggtcccagttccttctcggagccggctgtcccgcgccactggaaaccgcacctccccgcaggtcagtctgtctgccgaggcgctgcccggcgacctcttcagatggattat

SEQ ID NO: 13087 - DNA, 1193 bp, Homo sapiens
atcgttgccttatgcatttgttttggttttacaaaaaggaaacttgacagaggatcatgctgtacttaaaaaatacaagtaagttctctgcacaggaaattggtttaatgtaactttcaatggaaacctttgagattttttacttaaagtgcattcgagtaaatttaatttccaggcagcttaatacattctttttagccgtgttacttgtagtgtgtatgccctgctttcactcagtgtgtacagggaaacgcacctgattttttacttattagtttgttttttctttaacctttcagcatcacagaggaagtagactgatattaacaatacttactaataataacgtgcctcatgaaataaagatccgaaaggaattggaataaaaatttcctgcatctcatgccaagggggaaacaccagaatcaagtgttccgcgtgattgaagacaccccctcgtccaagaatgcaaagcacatccaataaaatagctggattataactcctcttctttctctgggggccgtggggtgggagctggggcgagaggtgccgttggcccccgttgcttttcctctgggaaggatggcgcacgctgggagaacagggtacgataaccgggagatagtgatgaagtacatccattataagctgtcgcagaggggctacgagtgggatgcgggagatgtgggcgccgcgcccccgggggccgcccccgcaccgggcatcttctcctcccagcccgggcacacgccccatccagccgcatcccgggacccggtcgccaggacctcgccgctgcagaccccggctgcccccggcgccgccgcggggcctgcgctcagcccggtgccacctgtggtccacctgaccctccgccaggccggcgacgacttctcccgccgctaccgccgcgacttcgccgagatgtccagccagctgcacctgacgcccttcaccgcgcggggacgctttgccacggtggtggaggagctcttcagggacggggtgaactgggggaggattgtggccttctttgagttcggtggggtcatgtgtgtggagagcgtcaaccgggagatgtcgcccctggtggacaacatcgccctgtggatgactgagtacctgaaccggcacctgcacacctggatccaggataacggaggctgggtaggtgcacttggtgatgtgag

SEQ ID NO: 13088 - DNA, 1192 bp, Homo sapiens
tgatgcaatttgaaataagctgctaaggagataacacccttaatctattcattgctggtgcgcttacccagtctggtttagaaccgtttaacaaaggcttagaatcataatgtctatgattattacctcttagctcctagttttactgacttccatgtctggaattaccagcacttctttttcgtacatatggattatatgaactaaatgtattgtttcttccctcactactgaaaatctattcaatatatggagttacaattcaaagtattttacaacccagaaaatatggccattccgtatgtggtgtgtatttcagaggtgctctgcaagctccatgaggacaggcgtgaagttcaggctacatgcctggtacgtaatagacgctctgacagacatttgctgaatgaataagttagtcactacggcgtttgtgggctttaaaacacaagtaaatgcgcttctatcgccaaaacctcacagcttcccttctgcaaggtggcgtacaaggcccacgaaatagtcggccgccgcaggtgcgcagcctgtccagcctgtccggctcggggcaggcgacctcgtctggtggcagtgggggaggcagccgtttgcttcctcacagggtgtgccggaatcagaggctggaggcgtctggggagtaggcaaataaacaaagccaaccgcaccgaaacgggtcgttccgtttcacatcctccctcgggtgtctgggtcttctcggaacaaagtgaccctccatctgtccgcaggcaggtggagcccgtcccacgcggcacgcgccttccttcctcacagccgcgtgtagacgcggaccctcagggacactgcggacgcgagaaaggacacgccccctcgcgggagcataagtccaccgcacagaactcgcgcgcctcccctcgaacgaacgcgcacgcgcgcgcagggggcgggtcttcttcccgacacccactgagcgcccggcctcctcaccccaccccaccgaactccggccgcccaggctccgcctccgcgacgggccgtcgggaggaggcgaccggaagccacttaaagcagagatcgaggtgacaggcgagctggctggactcggagcgcggtcgaggctttctgcgttcgcggcggcggaatggcccgtgcgcggctcgccgcgtcgcggctctgtggtccctagacgtcg

SEQ ID NO: 13089 - DNA, 1192 bp, Homo sapiens
attggtgaaagagaagcaagctgcctgctcagatggcagggaatggggaaaaacagggagacagtttcctgtttgagatgttgggagatgcttcgagtagtatatttactggaaatagacattcaacttggatgtccctttttggaaatgtgcctgcgtccagggctgggttggggccccaatgaactttggctctgacatagctgttgccacactcagtggaactgaatccatgtttgccttcacccggcatccttcaccccaactctccccgccacaacatacatcccatgccagcctggggaccctcaaaggtgcttcatcattaggtttgtggctgggtcctactgaagtaagtcttggcactcagagggataggaattgaatgaagacatgagattcctctgcgggaggcctctctaggaaatctgtggactcacacgtttactaatgttgctgcagccccgcacccaccttggccttgggcagccatactctagggcttttgtaacctctccatgtgaggaactcaaattagacctgggtttggaggcggtgctccgagctggcctttgggggaggttttgtgcgaggcatttcccaagtgctggcaggattgtgtcacagacacagagtaaacttttgctgggctccaagtgaccgcccatagtttattataaaggtgactgcaccctgcagccaccagcactgcctggctccacgtgcctcctggtctcagtatggcgctgtcctgggttcttacagtcctgagcctcctacctctgctggaagcccagatcccattgtgtgccaacctagtaccggtgcccatcaccaacgccaccctggaccgggtgagtgcctgggctagccctgtcctgagcacatgggcagctgcctcccttctctgggcttccctttacctgctggctgtggtcgcacccccactcccagctctgcctttttctcttctgggtccccagggtgaaattctcaccagcccaggggactctggaggcaccccctgcctccaaacacagaagcctcactgcagagtccttcacggaggacggttctgtgctgggcctggaggggctgcctggggggcaatgactgatcctcagggtgagctcctgcatgcgcactgcccaccaggggcctcatctccccatctgcaaaatcagggagagat

SEQ ID NO: 13090 - DNA, 1192 bp, Homo sapiens
gccacagcccaaataaacatctcccgagagcgagcggggcacgggcgggggcggccggaagggcccggcccagggggagggaattcaactcggacaaaagtccgggaagcgcccgccccgcccgggtcttctccacggggcgcgcccgaccggcacctccctccgagcgcggccacccactcggcctcccgcagctttcgcagcccggccacgtcggcctcgcccggtcgcccgcccgtcagcagcacccgtggcctcccggcgtctcctcggaagccggcttcgccacgtaacttcccgggaaccggcggccgccaaggaacgcggcgtccgctggctcagccggcgccggcaactcagcggccacgcaaacctgccggcccggcccactgagcatgcccggcccggcgggggcggggctggacgaggcgaggcgaggcgaggcggggagggggcggggccgcggcgggggagggggcgggacgagcggccggggtcccgaccccaagcgcggaaggaaaagccgggtaacccaagtaacttggaagacagtttccgctgccgtgcgagtcttcctgtttgtttttatccaaggtctggcagaattcgcccccaaggagaaagcgcctgtgcaccaaagctttccttaagagacttgtccacttgctcctcgacaagccacgcacatcatggggtgagccccatgcatgagtgcggctggaaaggccggcagagccgatacccgacagttgtttccttcactgggcaaacagcatggtcacggctgtcaccgcgtgcctcggcgttgttcccacggaaggcggaatgcattttctgcaaggcgcgtcatggctttcatctccgaggagctccggcagggtcagaagcgttgctctcgttcaccggcgccgactgccaaggctgaaactggtgatgaggtcatgggcacccggaggcagcagcctgagaaacaccctagagacctgtgacatctcggcccacaccccacattagacctcaagatatatccaaagtctctttcccgcccatctagacaggaatcttgaaaagtttatttttggccatcaagattgctgaaattcttgttgaccgaacgggtcaagctgccctgcattccaatgctgtccctccaactcaaagttgggcagaaaagggtgtaaacacgtgcagt

SEQ ID NO: 13091 - DNA, 1192 bp, Homo sapiens
atcctgctgagaggttagcactgcctgccaaagtcagtttgcaaaatcccagagaaatccagcttattcctgggggaaccgccaagactgcccagccctgtgtggggttcaggcaagtttctcacatgtgcctttttggcaagaggcctctggcaaccccatgagtccccaaagagactcaattctaaaagttggtctccaccagctctctgtggcttaggggttcaagttcaactgtgaaagccctgttttgttttgattttgctttgagggagaggaaaccgcccttctgtttgttcaactccttctcctaaggggagaaatcaatatttacgtccagactccaggtatccgtacaattgatttttcagatgtttatactcagccaaaggcgggatcccacaaaacaaaaaatatttttttggctgtacttttgtgaagattttatttaaattcctgattgatcagtgtctattaggtgatttggaataacaatgtaaaaacaatatacaacgaaaggaagctaaaaatctatacacaattcctagaaaggaaaaggcaaatatagaaagtggcggaagttcccaacatttttagtgttttccttttgaggcagagaggacaatggcattaggctattggaggatcttgaaaggctgttgttatccttctgtggacaacaacagcaaaatgttaacagttaaacatcgagaaatttcaggaggatctttcagaagatgcgtttccaattttgagggggcgtcagctcttcaccggagacccaaatacaacaaatcaagtcgcctgccctggcgacactttcgaaggactggagtgggaatcagagcttcacgggttaaaaagccgatgtcacatcggccgttcgaaactcctcctcttgcagtgaggtgaagacatttgaaaatcaccccactgcaaactcctccccctgctagaaacctcacattgaaatgctgtaaatgacgtgggccccgagtgcaatcgcgggaagccagggtttccagctaggacacagcaggtcgtgatccgggtcgggacactgcctggcagaggctgcgagcatggggccctggggctggaaattgcgctggaccgtcgccttgctcctcgccgcggcggggactgcaggtaaggcttgctccaggcgccagaataggttgagagggagccc

SEQ ID NO: 13092 - DNA, 1192 bp, Homo sapiens
ggctgtggatgaatttgagtaggtgggttttggccctttggtgcaatgaataggcagggcctagtatattagtgagattaagctgtaatagacccaccagatgccaccagtttaacacaaacatctattccttgctcacaaatctgggtgggcagtcagttcagagaggtggttgccttgcatgccatcactcagggaccaagactccttttttcttgtgtctccaccatgacccagagccatactgtgttttgcatccagatgatggaagggggaagaggtggaggggcagagaggctaggccatatgggccagacctcggtcttagagggccctcaccttttcattcactttcattagctgatgccaagtcacgtggcccagctggccacaaaggaggctggagaatgtatcctgttgtatgccgaagaacagaagaaaatattggattttggtgaacctggtagttcactatagatgagattgagagagccctggccaaggggtcaggacctggctgccagcaatagcttggcctctgtcaggtgtgagccttgggcaaatcatcttaattgaagccctgagttggatgctttctatcaaatcttccattttttgagcacatattatgtgcaggacattacaaataatgagagtcgtacatatcattttcctgaaattgtctctgtcttgctgtttatcttaaaaaaccaacaaaaaactccaactcacttttttcctaactataaaagcaatgcatgctttggttaaaaaaattataaaaatattttttaaaaatatgcggtggctcatgtctgtaatcccagcactttgggaggctgaggctggcggatcacctgaggtcggttgttcaagaccagcctgaccaacatgtagaaatcctgtctctactaataatacaaaaattagccaggtgtggtggcatgagcttataatcccagctactcaggaggctgaggtaggagaatcgcttgaaccggggaggtggaggttgtggtgagctgagatcatgccattgcactccagcctggatgacaagagcgaaactccatcaaaaacaaaaacaaaaacaaaaacaaaaaacaggtaataagaacttattgtaaatattttggtatatttctttccagtgttgtcgtgtatctattatgtctcgtgtgtatcctcgtgt

SEQ ID NO: 13093 - DNA, 1191 bp, Homo sapiens
agtgtggacatggcatatgtgagcttccggacacggcacgtgtgtgagagcctgtggacacgggggcatagagcgtgtgaacacatggcccatgtgtgagagcagccacgtatgtgtatggatgaggcaggtgagcacatgggtgggtgtgggcagggaagtggcaggaatgggctgtgagggcaggcagcagtgagcaaagggcaggggcaggctgggcataggttgtggggggctcggggagggcccctgctaggaggcccacccaggagctcaggggccacagggacctggaactgcggtgagcagcttccagcaggtgctccagcctcctggggctatagggagagagggctttgtccaagcacacaccccagcccagacctgcccaggctgcagcggctgtgctgacccctacccggctccgaccctcacccctccctccctgccctccagctgcctggcccgccaaggagaggatgaagccagccaatccctgaggcttgcggccacacccttggcccatagggtataaatagacctgcttgggagcccacacccagcaactcacacctgcctcagaccagagctctgtgcgggtgacggcgcacgcattccttgtgtccccgcctgtcttggacagagcagaagccacacctgccagaccagtgccaccgggacagctgctggtggccggccccggggagggatacctgctgggtgaagcacaggccgggccgggcccggagaagaggaagcagacactgccacggcagggcagcccagggccttggagcccaaccgtggccggcgaggaggaccacgcccaggcccgctgacccccggccaccaggtaaggccagctcagcccgtgttcaccccttacctgcacaggctcagggtggggcaccatcgtggaggggtggggcctcgtgccaaggaaccggttctgtggggtacacaggccgcagagcacagtccccaggtcccggtgcctggggcactcacggcctcacagtgacggcgtgtgactcaggtggtcacagtgacctgtgtcatcccgccagcctgtctgggactcactggcaagtcaggggtggggcggggcagtgccaggagtcacttctggggcagcctcctgggccccacggggacgcacggccaggcccttgagtctcactgtcacccttg

SEQ ID NO: 13094 - DNA, 1190 bp, Homo sapiens
ctcggctgccagatttttatctagataattggaactgctatggaggctgtgccttgccagccagcttagaatctgtaaagccatagtttgtccaccttgttatctgtggctgcctgggcagaggaaattaaagagatccacagccaggggggcgcttcctactcctgacctccccagcgatcccaaacaggacagtttgttagtaccgtctttttgtttttatgttttgatttcgttttgggtttttgttcgctcgtgtatgttattttggcatgtggatacctattcccctccacatcgcacatcgtgttttatggagtttagagctgaggaaactttggtcgggttgccaggacgttcgcaccactttgcggaaagcacgagctaacagtgagaccgacagagtgagtgacaagttgtttacaggtttccttgaaggggcctctgctatatttcaatctgtcaaagttgcttttcttccctcagaacaatgcctgattgttgtgtgtgtgtgagtgtgtgtgtgtgtgtgtgcgtgtatttccgtgtgtgaacggagagagcctagaaaagggtgagaaggaataacaattctttgtgtaaaaatgctattactaacattaaattttttgcttaattagttaataaatgcagtttaatcgagcttctgttattatatagactaggtttttaatcagcagcaaatacgttttacaaaatcatactgttctgcgtgtgtatgtgtgtgtgtgagttttatgatttagaagacagagtatgggagacgtgttaaatgagttgacttctcacattcagtgatgtctagaagagagaattaaaaggaaaggacaggcaccctgaggttgtctagagccttgcagccggagcgtgtggctccgcggaggggggagcagccagactccgctgctggaagtgcactacccctttaagagactggtcaaggagtcctaggagagagaggaggggaaggagggggggagaaagagagagagagagagagagagagagacagagagagagagggagagagagagagagagagagggagggagggagggggggaagagacagagagaaaatcaattggtttagaaggtttggactcacttgacaggttcagttggagacgatcataggtggctgctgtgacaaagggaaattgtgctttt

SEQ ID NO: 13095 - DNA, 1190 bp, Homo sapiens
gaccaaatatctgggcatcatgtggcctagtcaagttgacacataagattaaccatcacaatgaggaaaaacagaaatgatacatgtatacagagtgctcctcatcccaattaagtttcaccaagttaataatgtgtctctatgagaagtggttcaccatgttggtcaggctgttttcaaactcctgacctcaggtgaccacccgcctcggcctcccaaagtgctgggattacaggtgtgagctagcactcccagccgacaggtgcttcttaaatgttttctttgagcaggaattggtccaggaattggttctcaagttagaaggaaaatttgaggggaagaacttgttttttctccaatcagtctctgattaaatagttattaggaaaaactccttgcttatgtctttgtattgcacatttttatatatgtatatatgtgtaaatagagatatttatatattcacagacaaacacgtgtatgcacatttcacaatggaggaagaagggatatggtgtgcactgaggtaaagtgagcagggatacagaagagagctggagcctcacagtctgattctctcattgtacataacctttagggtctttgtttccctgagttctctggtatggggcactgttggcttgggctggtaccctgttattctctgtgatgaagggattcactggaggtaaaaacgtaatcatttccaaaggttgagaataaatgactttgaggaaagggtgttcattatccgttgcttctatattataatcagttgaactacaatacggttatctattgattttttttaatttttctgacaaattattgacaccaaattgaataattcatgacctgcatgcttcagcttctttctccctggtttccaggtgctattccctcaagaaatgcaaattaaatatgtcggtcttaataaatcaggagggaagcatagtctgtgtctgttttaaatgacaacaacaacaaaacagctttggggtttaagaagtggaagacacatttttatttttttgagacacaatctcactctttcgcccaggctggagtgcagtggcgtgatctcaggtcactgcaacctcccgctcctgggttcaagcgattctcttgcctcagcctcccaagtagctgggattacaggcacgtgccaccatgcccagctaatttttgta

SEQ ID NO: 13096 - DNA, 1190 bp, Homo sapiens
ttggacaaaatgcacaaacaaagcaagaaaggaatgaaggattttattgaaaatgaaagtacactccacagtgtgggagcgagcatgagcataggggctcaaaggccctgttacattttgtgagtttaaataccctctacttggggtacaccctatgtaaatgaagaggatgaagtaaagttacagttacaaagttattaatggcgggcatacgccctatggagaggatatttcccgttataactgaagtgtgaattggccttatgttccctgtctctagaccctattctcctgcttcctgtgaaagcagagggttttgtttgttttttgctttttgttttttgagacggagtcttgctctgttgcccaggctggagtgcagtggtgcactcggctcactgcaacttccgccttcccgggttcaagcgattctcctggctcagcctccggagtagctaggactacaggcgcgtgtcaccatgtcccagctaatctttctttatttttagtagagacgtgttagccaggtttcaccgtgttaccgtgttaccgtattccagccgggctccgcccctggattcggtggacagaccagctttacctccagagactccccctgtcttccctgcaccggctgactatacctacacacttcggtggcacaatctttgtttagatatgctgatgccttccttcgctgggaacggtccagtcctgcccgcctggcgctcagctctgcggatctcaggggatggagtggcaatctcattgctcccgcctctcctgacccctctcgccttctcctcgagacccgggttaagtgggcagagggctccgagggtcctctcccgccgtgggattgcacagagggctgggtccgcaggctggctaaaaggacctagcccaggattgcgaggcagcgccctccctgcagctggacagactcgggcgcccggcccaaagcccggcaggggcgtgtccgcgcgctcacctgctattggccaggtggggctgtcggctgccagcagtgcttatgctttaagtgcggagcgggtggctgcggagccaggcgcggcgcaggatggtggacagcgtgtaccggacccgctccctgggggtggcggccgaagggctcccggaccagtacgcggacggggaggcggcgcgcgtgtggcagctgtatatcggag

SEQ ID NO: 13097 - DNA, 1190 bp, Homo sapiens
cttgtaaaacgaggacagatgcccgtgccagaagtcaaccagagctttccccggcgtgggcaccagcccaagggcgttttgcttttctagtctcatctctgctctgacgctaagctcaaagagggactgggggacgggaagatatccaccatggcatgcgccctagctctcgggctggtgttggctgcttccttctcagattccagagtgcctagaggccaggaaagggagaaggtcctaccagcctggggtagggactcgggggccaggcactggcgctgacgcaggctagcagggcgccactggctggtccccacccacctcggtgggttgggggatgggcgcaccagcccctcctgggtgagccctagcctggggcttcctatttcgggagccgggggcgtgggccacgtctcctcatgtgatgcgagggctatttaaagcggcagcccgggcagggagccgccgtcggagcccttgcacgcctgctctcttgtagcttctctcagcctagcccagcatcactatggtggacgctttcctgggcacctggaagctagtggacagcaagaatttcgatgactacatgaagtcactcggtgagcaagccgcggggctcaggatgttggcttggggactggctggtggcgtgcctagccccacgcagcactcctgccgcatccctcctggttaagactggggaataggggagcgcggagatggcagcctggcctagagcaggtggggcctgttcagagggggctttggtggtccaaatctggttagagaccacggtagggaggtggtggaaggaggcagctgtgtgggaggctctttccaggaagagggatatgtgatttggaggtaggaggagggtttggataaagaacactgatcacaggaaagggagtgtagccaggggagaaaaagaacaggggcatgggtagtttagaaattggaggagactgaacccagaaagggaatggggcagccagggagtgtacaatgatgtaaacaagtaggaaatacctaggaggaaaaagattagtggggaaaaaactgtggatcagtgaatcagatatgagaaggacgtaagacaggaacctgcagtaagcagcaatccccatctctgcttggttagggaagagaattcttgctggagaatgccctttctcaccagccagtctgac

SEQ ID NO: 13098 - DNA, 1190 bp, Homo sapiens
cctcgaccctctaaagacgtacagaccagacacggcggcggcggcgggagaggggattccctgcgcccccggacctcagggccgctcagattcctggagaggaagccaagtgtccttctgccctcccccggtatcccatccaaggcgatcagtccagaactggctctcggaagcgctcgggcaaagactgcgaagaagaaaagacatctggcggaaacctgtgcgcctggggcggtggaactcggggaggagagggagggatcagacaggagagtggggactaccccctctgctcccaaattggggcagcttcctgggtttccgattttctcatttccgtgggtaaaaaaccctgcccccaccgggcttacgcaatttttttaaggggagaggagggaaaaatttgtggggggtacgaaaaggcggaaagaaacagtcatttcgtcacatgggcttggttttcagtcttataaaaaggaaggttctctcggttagcgaccaattgtcatacgacttgcagtgagcgtcaggagcacgtccaggaactcctcagcagcgcctccttcagctccacagccagacgccctcagacagcaaagcctacccccgcgccgcgccctgcccgccgctgcgatgctcgcccgcgccctgctgctgtgcgcggtcctggcgctcagccatacaggtgagtacctggcgccgcgcaccggggactccggttccacgcacccgggcagagtttccgctctgacctcctgggtctatcccagtactccgacttctctccgaatagagaagctacgtgacttgggaaagagcttggaccgctagagttcgaaagaactccgtggatattccagctttcccacaagcactgatcattatgagccagttacttaaccgatctgagacactctcacctcctaaatagggatagatgatactaatttgcaggttgtcattatgataagacaggatctgatcaatatatgtgaattgtttatatttggaacctttttattgagtggaagaagttgttttaaatattctagtcagttctttcctgctcccaggaaagcccggattatgttttaagataagcaaaatgtcttaaaagtaagctgttttactttgaatttttccctaaatgttgattagtgtactagatccattttaatttggaaagtgaa

SEQ ID NO: 13099 - DNA, 1190 bp, Homo sapiens
ggtttagaatgctttgcagtttcaaaaggctttcatatgtatacttcattttatacctcccttcaccccatgaagaaggtagtattatttccttattacaagtgagtaaatgagattcaaaaaggtagaacatggcatggtggctcacacctataatcccagcactttgggaggccgaggcaagtggatcacttgggctcaggagttcgaaaccagtttgcgcaacatggcaaaaccccgtctccaccaaaaaaaaaaaaaaaaaatagctaggcattgtggcacatgcctgtaatcccagacactcaggaggctgaggtgagaggatcacttgaacctgggaggcaaaggttgcagtgagctgagatggcaccactgcaccagcatgggtgacagagtgagaccctgtctcaaaaaaattaaagtagaacaacttaggtgtacatggttacaagaaaatgtaatagaaataaatttaagaaataaatttaaatttaaaatttaaaggataaatttaaatttaataaattgagttccttaattatattttaagacaaattttacttttttctcattacaatggacaataggtaccacttctacctacaagaattataaacataggccaggcatggtggctcacgcctgtaatcctaacactttgggagacagaggcaggaggatcacttgagctcacaagtttgacaccagcctggtgagggagactgagaagtcggcactatgaggaaatgaagccatgtaccctgaaaagtgtaaatttggaagaaagctggatgaccatcttgaaatgcttgaaaggatattgtacaggtagtactaaattatgaccccttttcactaagaaaacaatgggtcactcaggaagcactaaaaatgcagttctactaagcagaaaaatgcagggtgccctgggtcagcatgccagccaagttctatactgcaggacaagtccaaagctcctcctttaaaaaggctcctgcaggcaacatgcctgcacactaacgtgcagaaagggactgtactactcaaaaccaccaaggaagtggcagaggtaagtcaacatctaatcctgccactctgtgtggcaaagaacgctgggagcaaattacttctgctgctctttgaaggctgtgccagcgtcacctggatagcgcaaaggaaacaagaga

SEQ ID NO: 13100 - DNA, 1190 bp, Homo sapiens
agcaaaagatttttcaggcacagtaatttgatttagtctgtgttaaaaatcataaatagcctagaaatacaaaaaaaaagaggtgttcaggccttcacctccctgagatcggagcatcagagccctcatggctgctggtttgaagtaaaatgtgctgcaaacataaaatacacagcgagtttaaaagatttagatccaaaatatttataattatttgttgaccacacatgaaaaataatattttgggtataatggcttaaagagtattacaaacaatttcacttgtttctttttattattcctattatttctgagatggagtcttgctctgtcacccaggctgcagtgcagtggcacaaactcagctcactgcaacctccacctcctgggttcaagcgattctcctgcctcagcctcccaagcagctgggattacaggcgcccgccaccatgcccggctaatttttgtatttttagtagacagggcttcattatgttggccagagtggtctcgaacttctgacctctggcctctcagagtgctgggattacaggcgtgagccaccatgtcaggactctttttattactatttttgatctggctaataagacatttaaaattcacaatagctaacgttttattttttagaggattgcttctctcttaaaatcttaggtgtcccactccaaagaccggcggccagaaaggttatgaaatctgaaatattaaataattgtcattatattgcttccatttgtgaacaacgtgtgtgtgtgttttataaacgaacataaccttcataacgttatacaccacaatgctaaaaaaatgacccctgggcagagccaggcgcagcacagacagaaagccctgcctgaaagtgactggagccaagagcctgtcactctcggctcattccgtgcagtgtatggtagcatcttctgacacgcaaggcctgaggtcgcggtgcctgcactactatccaatcagggctctggggtgggaactgtccaatcaggcgcgcagccagggaggaaggggcggcttccggaatctggcgcggcctttgtctcacttcagccagagcgcggggttagggcttcattgccttgtgtcctctgctccgggagacttcggtgattctgccactcactccgtcgctctgtgacctgctggcattgaatgattta

SEQ ID NO: 13101 - DNA, 1189 bp, Homo sapiens
tgtttgccagactcatctcagaaaaagacattatcaaaaggcatttattatcttcctaatgcgtgtctggcactgggcagacactgtagaatactatcttgattagagtctcaaggattttgtacttaaagtcctttacaaataaaagtattcaagtataatctattataaagactcttttctccactttggggatatacggtgtggcatcgattcattggtcataccaaaactgttacttctgttttggaggaattaacaaggaaaacccaggcttagtaaatcaacatcgaagttcagaagttcagagtaatttgtcttgggaacaaagtcctccctagagcgaagaggcattcacaggagctcttggtgttaatgggattattcaagatatacctgagaccagataaatatttgatgattttgccaagcactagggtttctttgcagtttgtctttggctgacgttttccccccgtggggtttggactttgtggcttcaccagattttgcaaatgaaagaaggctggggtttcccaagagtacacttgtgcaggaaacaacagactagtgaggtttacaagaggggggtgtgtgtgtgtgtgtgtctgcctgtgggatgggggtggcacgggggagagagagatgtgggttacaaagctgccatctagaggctagaggctcctttctgcagtgtatataatgcaagtctgcagccagcagagctcacagttgttgcaaagtgctcagcactaagggagccagcgcacagcacagccaggaaggcgagcgagcccagccagcccagccagcccagccagcccggaggtaaggaaacggtgctcgggcagcagctctgctcggaaagaaggcacggcttctgctcttaagccaagtggtcttttcaaaggccttctttaaaatcgctcagatgggtgcttttgagtctgcgggtctggtttctgaaaacccaggctgcacgcagctgcattgcaaagtgcttttgctaattcggagggcttcacctttctcttcagaaagcaaagggcagttttcttaagtcacttgcagaaggaaatttccatgtgtatttaggaatctggtgtttatttgctgtgtggctatttaagctccagtaagcaggggaactttgcaagaacacagactatccattctgcctgaccaattt

SEQ ID NO: 13102 - DNA, 1189 bp, Homo sapiens
cagcctatgcttcaggatgatctgtctaaccacagagtagaggaggcccagaggatgaaggctggaggctgcaggtgaaaaggttgacgccaaagtccagacaaagaagggagagaatctaggggtgagggggtgcttgtaaggagctgcctcagaggcaggaactgggacgtgcacccattgggcaccacgcctctctgtgcttcacaacaaactggcacatcccaaggccactggaagccctgctgggccatctccccaaggccagtgctgtacacataaccctacaagaccagtttcctacacataaccctacaagaccagtttcctacacataaccccagatcccttgtcctgtcttctcagtggggctggagcaagtcagcaggtgccactttctcctgccttgtctctgcctaataaaatgcgtctcaatgttttacacctgccatttagcatggactgctttaacacctcaaaaaggcctgtggaggagcctataatcatcaaggaggaattcccagaatacaaaataacactagcggctgataacaactctaaaaaataagtttgtgtaataatgggggtgagaagagatcataaggttatgtaaataaggtgaggttttgagttcaaaggaattctctggtatttttctgtgtgtgtacacatgcacccacacacttgtgtgtatatgtgtacagacatatataaacacatgcatataatgtgtatatatgcattacatatatgcacattcatacatctttatgtacaaaatacatatatgtatatataaacaccgatgtacaaacacatacgcacacatctatatacatacacatgtgtgtgcacatatacacatacctgcatatacacacatttcgtggggtgcggagagtcacttaaaggctgcagggccataaggcttcctgcttgactgatattcattaatgtttgctgaattacagcaaacctttgctgtgcccatcctgttctttatcattgaccattgctctcaggagttaatgtttgaacctggccataaaggaatcaacagctgctgacctctggccgctattcgaagggaagggagccccctataaaacagcctacagtggacagtctggtcggcagagccgcaggtcagtcgtgaagagggagctctattgccaccatgagtttctcc

SEQ ID NO: 13103 - DNA, 1189 bp, Homo sapiens
cggagatgagtccaggtgtaagtaagaactttcacctccaaacagtggggccaagaccaccttccctgaaaccactgcccacagcaatgaggactgccaggagtctgagccccacagctccagaaggacctactaggtgataagttgcaaagcttgggccacaggtcctgcctcttcctacagacacaagctagacactaccttggggatatgatggggtgctgtgaggctccttactgagcaaataccttgcattacaggggaggccaaggcccagaaaggagtacacctgctcagagtcaacatagctcagaagtcctgccagaacaggagccttgatctcctactggccccttgatttctttcccagtcttacacaaatgtgttacgtaatctacttattgtgcaaacccaaacaaagtgacatccctccctgagcctgtttccttacctgcaaaatggggagccgcatctgactttccaaggtggttatgcagggagggaacctctaagcctctcattcctctcactaagacccagctctcatctggatcccacacactacagatggatgcttcacaaatatttttccagggaatgtcaggggatgctaagcataagacaagccatattttagagcagaaacatggggagagaggaaaaacgtacaccttacagagcaatcctttcacatgaggaccatctcaggggagcctattaagctcgtgtgatattaacagcttgagtgcctgaagggcacacagtgaaagatcagggaagaccaggatatcactttggaaacactgctggggtacacagctttttggtacaagtagtgtcaaaggaatccctggctttgagatgtaagggctccaacctcccagaagtcctcccagggcagccccagcgacaggcacaaaggtcacacccatgcaggaagagagggaggaaggagaggagctccataagcccagacaagggcttgagagcagacaagggcttgagagcagacaagggcttgagagcagacaagggcttgagagctggccaagcagtttctctcagcttctgtgttccagcccctatgtgggaggagagaagggcaggaccacaagcctgccagaggctgcggcctacagccggggagaggccagcccggcctacagtgcggacacaggacagaggggag

SEQ ID NO: 13104 - DNA, 1189 bp, Homo sapiens
actctaggagctttggggagagaagagagaaaggcatggcagtgtgtgtcggggtgagtacttcctattcaggcctggagtgctgcagggtgatgaagacaactagaggtggaaggatttgagggcaaggcaagtttgcacattatattcccaaggctgctttgaggttgtggagttgcaatactgtttctgaaatctgaacactcagtgtcaataggacatggacttgatttgtctgcttatcccgcctggtgtacatcccttcctcagaaaggccttcccccgtgccttgcagaccttgcttgtttgatttttatcttccctgctagaaggttagcccactgaaagcctagaccaggtcatcaacactgtcttcccagcgcctggccaaagcctggctcacactaggtgctcagatatgcagtgacgggagtagctcaattcctatgtattcgtctagaataaatctgctgtcagcatgctctgggcaatctgtttctttcttggtatgccttaccttggttagacataccacccggcatcctatccttcatttcagtggtttaaaaaatatatgcccgttgtctcttattgggaagctgagcagaaagaaaacagtgtctgttttcagaaccggtcctggcagcaacactcactgatgcctgtccctgcccatgggtggagcagtggggtgactttgctgctggctgcccattggcctatcctccaccctctgctctcctgagaagtcaagtgtggattttgtctgctagttacctttagcccagtgggcagcagcgtggggctcggcatgtgacttgtgccctgagagaccttggtaggctgggggagcgcagctgagccctgctaacccccgcccacttccaggctcattgccctcttctgtgtctgcagtggggtgtcacctagtagtcagctgttggtggcacagatggtgagtggttttgttaagtgctggtgccttctttccagaaccatggcctgaagaaatctgcttatctgttctttctttgctgtcatggtaaaccttgaaatttcgtgtgtgtgtttgtgtgtgtgtgtgtgagtgagtacacttacatggattcattgtagcagagattgaatgagcagagcaaatacattatgttggttctggtagtattaatggcctgtaaaacagagacca

SEQ ID NO: 13105 - DNA, 1188 bp, Homo sapiens
tcctctcttctcctcctttctcccttctcctcccttctcttctcttctcttctcttctcttctcttctcttctcttctcttctcttatgatagggtctcactttgtcatccaggctggagtgcagtggtgcgatcacagctcactgcaccctctgcctcctgggctcaagcgatcctcccacctgaaccttctaagtagctgggacttcaggtgtgcaccaccacagccagttaatttttattttttgtagagatgtggtctcattatgttgcccaggctggtttcccactcctgggctcaagcaatcctcccatctcggcctcccacagtgctgggattacaggtgtgaaccattgtgcccagccaatagctggtgttttcttgaagatttcctgggcctctccagggggtttttgttgttggggcatgttccatggtattcacagcagagttgtttgaaggggcacgtgctcgcttatgtggcttaggtccacgctacctgtagtccttcggaggcaagccaggctgccagctgactgtcttccaccacaaagcctgtgttcttctcctgaccctttgttctttgcacagcgtactgtggctccagtccaagtacacaaacttccatgtagtttaaaaagaatcagtttaactgttggtggttagacagattggtatgtacctgtgtggagagcactgtgacccagcaaaacacttcagggctaagaagacacgaaacggtggcatttgccatctgacccggcaggcgctggggcagatgaagctccagttggaagggctactgctgaattttttttttttttttttttttggttgttgttgtagctctgggagcagatactagctctgaaacttttcccctggctggcttggctgcctctccctgccgggcaggggccaggaagcctgggtgtcaggcagacccgagccaggctctgcacagcagggcattacgcgccccacgcatcctcttccatccccaggcacagatcaaaggcgcagcccaggaggcgggagcccctgcacactttccacctctgctgggcttagcctcttggctggttggtctgtggagtgcctgaagtgaccagctttttgtaaggtacggtttatttgactttgcaagcgagcacctgctttgggggttggagaggtttgtgttgact

SEQ ID NO: 13106 - DNA, 1188 bp, Homo sapiens
gaagccaatcataggcggaggctccgctaatggggccgccgccgccgccgccgaggaggcagccagccgcgcgcccgggcgcaagcgacagctctccagggacggggatgggccgggggcgcgcggggggcgggggcgcacggggcgcgccggagaaacttcccacggcccgcgctctgcgccgcgctcgcggaccctgcgggcgtgaccacccaccctgcgtgtgcccgcgtggggctgggggctccgggggaggccaggccagccgcggcggggggaggggagggaggaggaggaggagcgcgggaggaagatgaaaggcgagcagacctgccttggcgtctccagggagccccggctcgcgcgcgccctccccgccccgcgagcctcgccgtccgcaccccgccccccagcccgccgcccgcactcactcgcgcgcgcagaccgtcagcccagccacttcgctgcgagggagcgcgagcgagtatgaatcggaggcagctcacatttcaaacttgcacgcaggggtggtgctggtgcacgccgctgccgagcgaacgcacgacccgacgagcagcactccagcctccgggcgggggcggcgacgaggcccctttccttcccccgcccaggcaattaattggaagcaacacttgtgcgagtggggctcccggagcgctgtcgcccgaggaggccgccgggaaggcgctggcggtggatgacttcgggtgtctcccgccccccagcgaatcctcccaagtgggcatgctaatgagggtccacggcggggagggggtggaggagggagctgaactggagggggcctcggccggggggaggggaggggaggggaggggagggcggggctaggcatccagattaaatctcggtttaaaggattttcggaacgggctacggggtggagaaggtaggcggcccggcatcttacttccctgaccctgggtgccctggcacccccgggattccccgagcgaggggcccaggacagggtgaacacgcgcacgtacgctcccgctccccgacttcggggagttcctgtgaccaggagctggcggcaggagggaagccgggggcggctgcgcgcggccctgccccgccccgggagctgctgccttcctgacattgcatcctgtggtggccgaggcctcttccttccagccagtctgt

SEQ ID NO: 13107 - DNA, 1188 bp, Homo sapiens
caaaccctcagcatcacacaatacaccagtgtaaaaaacctgcatacgtacctgaatctaaaataaaagttgaaattataaaaagaggaaaaaaagaatgctcatgcacagatatgcatgtaaaaatgccagggagggttaattcatagcaacagttgctatttaacctactttacttgaggttggcaaagcaatcattttttaaatattaatttctgtttagtacagattgtccttggtcaggactcctaaacagagtgcaaagttctgattgtgtaattacatactattgtagggtgaaagagaattggtaaacaggctcctgctgtgactatagtactagactgaagtaggactaaaattgctctaggacttactctggtagaaaaggtagacctatcaataggggaaaaagtcatacctaacatgatgtagaatttttttaaattgtcatgtatatgaattgagaaaaaaaatcatgctatgcatattatgagaccagtttccccaatggaataaaataaagtacttgaacagctgctatattagcatctgtttgtccatatcatcatccagttactagaaagacataattcccactcttcactcaatatatagatggaagtggtttttatggtaaataaaattagatttgcaataagacaaaagtaatgattcagggcttggttaatgttaagtttaaatgtacatatcatgttgagaattttctttgaacacataacaaaaaaaaagtgctactgaatgaacattattgcaatgtagtaaagcagaatgcaaattccttgaggtcagcattcaagtctgttttcctcgcagcggtgcccacacacctagcatactgcctggcacacagtaaatgctcattaaatatttgtgaggtacatggacaggggaatgtggtagacagctgatgaagcttttctcccactgttgccctaggtggatcatccatagtcaattgattctgaactctgaggtccaagttctgccctcctccttcactctccccacaagtgggcgggacaatcctccctggatttgagcacagggggacgggggtggtcagagagaggtaggggcactcagagatccagcaggtgctgcaccatgagtgtctctgtgctgagccccagcagactcctgggtgatgtctctggaatcctccaa

SEQ ID NO: 13108 - DNA, 1188 bp, Homo sapiens
agtccataagcttcctgaagtggggggcctcaggcatcgctgcctccccaaagaggatcaggcccagaacagtatgctccagaaataagactggaaaaagggaaagaggggcctcaagtccaggagaccagcggctttctgaacgcgcacctgccaacccactttggacaggtcacgatggacagcgtggcaggaaaagaaaaggtcactgtctacccaacacatgagaaactgtttctcgtgcctcacgtccccactccgtccccacccatgttgtctgagtccctcggtgtcagaaacactgctaagaaatttaagaaattctgttaatgagtttaagaaatgtttttaatgattaaaagtcagtgacttgtgaataaccatgtaacttacaaacgcaaggaactctgaaagtgtgcagcaccaccgatcagaagagaaaaccaagggacccgaaatatgctttaattaaattttcttttaaaatgtcactggaaagaacatcttgggaagacggcctggccgatcgccgtgtgaagggcaagccactctggccgagagggagccccacacctcggtctccccagaccggccctggccgggggcatccccctaaacttcggatccctcctcggaaatgggaccctctctgggccgcctcccagcggtggtggcgaggagcaaacgacaccaggtagcctgccgcggggcagagagtggacgcgggaaagccggtggctcccgccgtgggccctactgtgcgcgggcggcggccgagcccgggccgctccctcccagtcgcgcgccgccgcccccgcccccgcccccgcccccgcccccacccccacccccacccccacccccagccggcgcccgcgcccgcccccgcgccgggcccggctcggcccgacccggctccgccgcgggcaggcggggcccagcgcactcggagcccgagcccgagccgcagccgccgcctggggcgcttgggtcggcctcgaggacaccggagaggggcgccacgccgccgtggccgcaggtcagagtacgggtgcccgcggcgctcgggaaccggctgctggctgggcggggagtgctcagggagggggcgcggagggctggggccgagggtctgggggctagggccgaggaaacgggaactgacggggtcccagacggatgagagct

SEQ ID NO: 13109 - DNA, 1188 bp, Homo sapiens
acatcaccagctcagcagcttaggtcaaaagtgagattcctggtctggagtcaggggacctggtcttttcttcagctctgctgctgagtcattgtgtgaccccagcaggtcccctccctgtctttagttttctgacctgttcaaagtaggagctggattaaaccagtgggtctgccagctaagtgtttggagaatcagatgagaataaaccagacattgctggtttctgctgtacttttgctgcagggaccatgattgagaattgagtgggagggtcagattgaacatttgagtcttaggtattgcatgtacctttgacaagaccttggtaactccccctcccccattccctacccctccaaaaggtaatcttaggcattgcaggtaccttggcaacatgtcccccgccattccctatccctccaaaaggtaatttaggaagctgctggaaataggggaatgggacaggcagttggaaccatatgtatggggagagtccctgagtgaagtgggaatgggatgagcctgggatcctcagagacatcaagttgcccggtgtgatcacaggtgtgtcttaggccagggcatcagctcccagcaggggagagggatgcgaggaggcctcatggctcagcagaaagaaacctggttaggatccagctttcagtcctgaatcctgggctgtcggccaggccatggctgtagctgcaaataggcaaggctgacctaaggtctcacaggacaaagggcaccctgggagagctggccccaggccccaggggcctcctcttcttagggatcctgggagctctgctgaccaaggggctaggggctcacctcctatgccatcacccagctacctcatcatggtagccttggtccctgaacactaatgggtaagccccagagccacgagccagtgacctctgaatggatggcttccccttcccccaggcaccaggcaagacaggtagaggtccctggagacctgatggctggggagggcccagtcctgggccagcccctgagggctggattctggctgcaggctctccagtccatccactcccacctccagagtccaagggtctatgtggtgggcagtttgagctggctggatactagagggaggctgcacctgaagcatttggtgggtgagcagcatgggctttgaggagctgctggagc

SEQ ID NO: 13110 - DNA, 1187 bp, Homo sapiens
tggttgaggtatggtcctcattttactggttaacagttcaaagctttgtgtctcactctttctctgataactttataaggggatgggcagggagtggtttaagtgtagaagtattcagctggacttgaatatttcaataagtcagattaataaaatcagggcatctgctttgtttcttctttttacatccttaggaaattcaattggtgatctataagatcactttaatgaaaattaagtgggtttaagatttattatacttaattgggaagaaaaagccacaaggcagtgggtgggaataactgactccctgtggaaccacttgcatgtttgttatgggatcccaaagttaccccaaatctttctcctgatgctcagagtgaggagatgggcccagagcagtgaccacagtcagggagatcagtgggatagggtttggacagcaacctctgctttcctctccagctgggagactggcatctcttttgagctgccgtacctccctctctctagggagagcctgactgctcttttggttcaaaagggaatggcttaagcaaatctaactttagggaatttgccaagccagggttaaggagcacgaatccaacaggtttggagtggtgctttgaaagagcagcaaatggcctggctgctgctctcttgttcctccctgaagcctgagctctgcccagctagtgaatgacaaagggggcgctttcagcctctgtaaatagcctattgtacaaggggaggaggcggggcacggaatggcagcatcttgccagcttgggttgctgcgttaaggaaagatgtcaggctttcttaatttgccactgcaggggcaagggtgtcatttatgtgggtttgtttgagggctgcattcctagtgaagtattccatcaaactgccattattcatcttgatgaaagcttgaggaactttagaaggagagaaacatccagaccacccggtttttggtttctaaatgacatgaagagaatacaatgttaatgtaagtaaaagtttgcagagttgcaggggcagtgtgtgtgtgtgtgtgtgtatgtttgtgtatgtgtatcttcaagagaatgatgtccttgtgagtcacctctggccctgagccactattttcatggtacaaataaaatggtgaagaggtgaacctttgtgtatagtgggcc

SEQ ID NO: 13111 - DNA, 1187 bp, Homo sapiens
accaaagcccttctgattcctaccgctcctccagttcctgcccttccccatcactaactcccaacaaatgtacacagattgtatttgtgtagatgtggcctcaggaaatcaaaaggtcctagaatgcaggtaatttaaagtcttactaaataatcttctgtccagtttttccacatgggttctataatctattcaaggagatcggggggaaaagcattcttttatttatttttgtacctcattagtaagtcctaaccatactcttccttaggtcccttttccaactcagtctcgttctcacatttttagaaaggacaacgggatctttaaattctctcggtttgtgttgggaaaggacccaaattagtgtgcttcctcattgacagtcagagtagccttcaagcagtatatccagggaaggcatttacacctcctccccgccctctttttcagtttggcctactctagcctgcatttcgctctccctgtaactatgagagaaaataacacacactattcactctcctttgtctgcaaagtctggcatttcagtggttttctttaaggggggtcctcatttgtgaccagctttgtcattaacggaaatcaatctgaatgccccattgtgcatcttttttctttccttgcagtctgagattgcctttgccaagttttttctcaccgaacctgaaagcccttctctcattttcccgttccctgcctccagccccattgaatccctgccgagctttctcaggcataagggctgtagtgtgaggattgggaggaactcgacctactccgctaacccagtggcctgagccaatcacaaagaggattggagcctcactcgagcgctccttcccttctcctctctctgtgacagcctcttggaaagagggacactggaggggtgtgtttgcaatttaaatcactggatttttgcccaccctctttccaaataagaaggcaggagctgcttgctgaggtgtaaagggtcttctgagctgcagtggcaattagaccagaagatccccgctcctgtctctaaagaggggaaagggcaaggatggtggaggctttctgtgctacctggaagctgaccaacagtcagaactttgatgagtacatgaaggctctaggtaggtaacaataagaccggctgttctcttctcaacgtgcagctt

SEQ ID NO: 13112 - DNA, 1187 bp, Homo sapiens
cccactagtaaaaagagggaggcttaagatgatctacatgttcccctctgagtagtaatcttctgtggaattcatattttatcctccagcaccgaggggcaggggtgtcactctgcccccaccccctgcctcacctcttccccattactttaggacctcaaagcactttcactattagttcccctctgttgtcctttttatttcccagacaaagggaaatgactcaccccaaagtcaactggagtgggtggaatggtgtcatacaagcaaacagggagtccctacagacatccctacctctgtgggaactccttcccctggaggtgttctccctaaggcgagtagaagggaaagggggtcacatttcctttccttctctggactttgccctgaagcagagggcagcctaagctcctgactccagggaaatctccctccccggcttctctctctcccggtcaccagtaacctcaggacgaggtcagtcctgcaatcacgtgaagccctcacgtttgcaaggtttgcagaaagggcctcttagctttgatctcccagacagcaaacaagcttgccagtccctccccagaaattcacatgcccctgccatacaggctttctaaacacgccaccctgactcttcagcgcaccccaccccaccccactctcagctcctcccaggtcccggcaagcgctttgccaggcagaaaggggaaaggcacgcagtccgcccactttgtcggtggactacaaatcccgacagtcttgtcgttgcgcaggcgcgcaagagctcaacgtgccggctgttggaaaagtgtgtcactggggcacgaggcgctccctgggatcacatggtacctgctccagtgccgcgtgcggcccgggaaccctgggctgctggcgcctgcgcagagccctctgtcccagggaaaggctcgggcaaaaggcggctgagattggcagagtgaaatattactgccgagggaacgtagcagggcacacgtctcgcctctttgcgactcggtgccccgtttctccccatcacctacttacttcctggttgcaacctctcttcctctgggacttttgcaccgggagctccagattcgccaccccgcagcgctgcggagccggcaggcagaggcaccccgtacactgcagagacccgaccctccttgctaccttctagc

SEQ ID NO: 13113 - DNA, 1186 bp, Homo sapiens
gtatctgtggagctggattctgggttgggagtgcaaggaaaagaatgtactaaatgccaagacatctatttcaggagcatgaggaataaaagttctagtttctggtctcagagtggtgcagggatcagggagtctcacaatctcctgagtgctggtgtcttagggcacactgggtcttggagtgcaaaggatctaggcacgtgaggctttgtatgaagaatcggggatcgtacccaccccctgtttctgtttcatcctgggcgtgtctcctctgcctttgtcccctagatgaagtctccatgagctacagggcctggtgcatccagggtgatctagtaattgcagaacagcaagtgctagctctccctccccttccacagctctgggtgtgggagggggttgtccagcctccagcagcatggggagggccttggtcagcctctgggtgccagcagggcaggggcggagtcctggggaatgaaggttttatagggctcctgggggaggctccccagccccaagcttaccacctgcacccggagagctgtgtcaccatgtgggtcccggttgtcttcctcaccctgtccgtgacgtggattggtgagaggggccatggttggggggatgcaggagagggagccagccctgactgtcaagctgaggctctttcccccccaacccagcaccccagcccagacagggagctgggctcttttctgtctctcccagccccactccaagcccatacccccagcccctccatattgcaacagtcctcactcccacaccaggtccccgctccctcccacttaccccagaactttctccccattgcccagccagctccctgctcccagctgctttactaaaggggaagttcctgggcatctccgtgtttctctttgtggggctcaaaacctccaaggacctctctcaatgccattggttccttggaccgtatcactggtccacctcctgagcccctcaatcctatcacagtctactgacttttcccattcagctgtgagtgcccaaccctatcccagagaccttgatgcttggcctcccaatcttgccctaggatacccagatgccaaccagacacctccttcttcctagccaggctatctggcctgagacaacaaatgggtccctcagtctggcaatgggactctgagaactcctc

SEQ ID NO: 13114 - DNA, 1186 bp, Homo sapiens
agtctcagcccccgaactccaccgcacctgcaggtccccttggcagcactcaagcgcggggatgctccgcttagacgaactcacgtgcgggcagcaaggcctgcgatacttgagcacccctccccctctcccgtttacaccccgtttgtgtttacgtagcgaggagatatttaggtttctagaaggcaggtcatcgcaggccccacccagcagtggagagagtgagtcccagagggtgttgccagcgagctcctcctccttcccctccccactctccccgagtctagggcccccggggcgtatgacgccggagccctctgaccgcacctctgaccacaacaaacccctactccacccgtcttgtttgtcccacccttggtgacgcagagccccagcccagaccccgcccaaagcactcatttaactggtattgcggagccacgaggcttctgcttactgcaactcgctccggccgctgggcgtagctgcgactcggcggagtcccggcggcgcgtccttgttctaacccggcgcgccatgaccgtcgcgcggccgagcgtgcccgcggcgctgcccctcctcggggagctgccccggctgctgctgctggtgctgttgtgcctgccggccgtgtggggtgagtaggggcccggcggccggggaagcccctgggctgggtgggaggtccaagtcggtctctgagacacgcacaggggccggcgacttggcaggtggggagcttggcccgcggtcgtggttcccgccgtcctgtgcctttaaggctctcgccgctcaccagcatttggggctcctgctgtgtcggcccccagctgacttggctttaggggtcggcgtggagggttaaagaggccccggctgggtttgcggagcagccaagcctggcaaaatcgaaagggagggctcaaagagactgtatccttaacccccaaaaagctggtctaaaaggatgggaggccagaccgctgaccgttccccactctcgacagagtccagccgtgtggagcacacgatgctgcaaacttgcatgtcatctctttcaggtgtggcatttcaagggggcttgtgtcttgaaaacagcaactgtgaggacacttgatagtcatttccttcagttctgcttttgtctccctaggtgactgtggccttcccccagatgtacctaatg

SEQ ID NO: 13115 - DNA, 1186 bp, Homo sapiens
aaccccagaactcccgaggcagggtgtgtgccgcgcgcgggaaacgccgttctccgctccaggcgtcggcgggcggtggcgagagcaggttcgggggtccggagggtcggagggtgggctgcgcgcgggaatggccgccgcgaaggaggggcggcttcctcgggcatcccgggcgcccggccccgtgcatgcaacaggggactgggcgcgagcgggcgcctcgaggtgccggggcgggaccggggagaggggaccgagacaaagttcccgagacccgcgggcctcgggccgacccgcgcgcccccggcccaaacgctcagctcccgctccccaggcccgcgcggacccggcccctccgagggtagcgggttccagcggcgaacccgcagcgcccgcgccggcgcccgctcggccctttcccgcccggtgcgtgggtccaggagagaaagaaagcgcggcggtgtcggtggcggcgcgcggccccactcaccatgatccgcagcggctgtggcgcggcgacccgggcgggcggcgatgcgctgtccagggtagccgggtccctctgcccggcgctatctcggcgcccgcgccggttacccccacccacacccacgcccggcgcgcgcacacccgcccgcgcctccccgccccctcgggctcgcgccgccgccgcgcggcgctccgagcctcggggccgtttcgtccccgccccctctcccacaggggcctcgccggccgccgcgccaggagggcgcgcgggggaggggcgcagggcaagtgaggcggcgccccccgcccctgcggcctcgcgcgccccctcctgggcgaccgacctcgccctcgcgtccgcggcgtcccctgccggccgggcggcgatttgcaggtccagccggcgccggtttcgcgcggcggctcaacgtccacggagccccaggaatacccacccgctgcccagatcggcagccgctgctgcggggagaagcagtatcgtgcagggcgggcacgctggtcttgcttacagttgggcttcggtgggtttgaagcacacattagggggaaatggctctgttcctgcaggtttgcgcagtctgggtttcttaggtttagggggttgggtgggtttctctgggggtgcggtgggaagcggatcagttcggataacggccctgagcaagagtctctgtcc

SEQ ID NO: 13116 - DNA, 1186 bp, Homo sapiens
gtaatggttttcaaactgcgaggtgggaggaggtgctcctgacaattttcgctttgcaaacatttattccttgatttaacccactgccattacgaccactgtgacttgctgatttatcaaaaattggataaatatgttacttgtttttattaatctttctcaagtgtatatttcacatttatttcaatggctaatattaggagtgttgtagtgtttatttagaagtttggtgatgtttttatgaccaaatatatgctgtaggaacttgactcttgtttatatccatcaacttatgggaaaattggttttgttatacgttgctttgcttgaagttgcagtttccaagaaattatcaacaatattaagtgaggacttactatatatccattatgcctcaataaaactgtttttttgttttttttaatttgagacctttacccggggtcctggtgaccaaaattaaggccatgaggacattgagtgatttgatacatgtatcaccctcccaggcccctgtctccctgggcggcctgcactgcgcagtgcccagtgaccagctgtgcttggcctaaataagtgtttgtgtggttgttgaaataatgaataaaaagtagaaagaatacatgcttactgatggttgtcactgtacaaaagataactgacttgtgaattcttggaagtcattttttgttttgtttctttgtttcaggttcatattctaaagagagcaggcactgagcaaatgtttgttgaactgaaccaatctgctagttatggggacatgacctccacttcatggtgttgaactaaacaaacacatacttctccagacaaatattaaaactggtgaacttcaaaataacgtgaaaagctcctatgtttccatgcctcattatatgccacaaaaaatcaaatgataacgagaacaaagtaggttattttgtttgctatttaacttgtgtgcaggtcttcacagaatgagaggcataccaacactcatgaccccaggctagttctgttctttgccagtgtgtggtttgggagttctgtgaagtgtttgcagtcgctactaataatccaggtgacacggcaaacattgcagttcctaggtccagcacaattagaggagggttcactcgtaggcagcatctgagcaacaggctcaccagacttcagcctcttcact

SEQ ID NO: 13117 - DNA, 1186 bp, Homo sapiens
aaagcatgagtcagacagcctctggctttctggaagggcaaggactctatatatacagagggagcttcctagctgggatattggagcagcaagaggctgggaagccatcacttaccttgcactgagaaagaagacaaaggccagtatgcacagctttcctccactgctgctgctgctgttctggggtgtggtgtctcacagcttcccagcgactctagaaacacaagagcaagatgtggacttagtccaggtaaatgctgcattgcatgtgacaataatgtaaatttttagtttgtatttttctgcagtaatgtaatagagttttttaaggataggtttcttataaagagattttttttttttttgctagaaacagcaccctccacccaaaatgtatctagccatgcatacgctctctttttccagttggaggtgagagtgaactaaaggaacaacatccaaacttgtctccacaaattgtagacttgtaacagtatgcaaatcttgctctacaaaaattgctctactatgaagttcttacttcacaataactaatagtagggacatttctactctgaaatttcatttctcaccaaaaataaggataaaagcaactgcgaaatctaaacacaaggtttaaaagcagttctctgttttggctaaaacttaatgccatcaatttttagaataatgagaaagatttcccatgcagtgtttcgataattttcttttgtcagaaatacctggaaaaatactacaacctgaagaatgatgggaggcaagttgaaaagcggagaaatagtggcccagtggttgaaaaattgaagcaaatgcaggaattctttgggctgaaagtgactgggaaaccagatgctgaaaccctgaaggtgatgaagcagcccagatgtggagtgcctgatgtggctcagtttgtcctcactgaggggaaccctcgctgggagcaaacacatctgacctacaggtaggcagactgagggccagagtgagagagctatttcccatgacagtggtaagaagtcatgtccaatgtgtctctattttgtttcattctaaggattgaaaattacacgccagatttgccaagagcagatgtggaccatgccattgagaaagccttccaactctggagtaatgtcacacctctgacattcaccaaggtctctga

SEQ ID NO: 13118 - DNA, 1186 bp, Homo sapiens
caacgtgggagctaaaaatagcagccccgggttactttggggcattgctcctctcccaacccgcgcgccggctcgcgagccgtctcaggccgctggagtttccccggggcaagtacacctggcccgtcctctcctctcagaccccactgtccagacccgcagagtttaagatgcttctgcagcccgggatcctagctggtgggcggagtcctaacacgtgggtgggcggggccttttgttccagggactcttttctcaaaacttcccagtcggaggctggcgggaacccgagaggcgtgtctcgccagccacgcggaggggcgtggcctcattggcccgccccaccaactccagccaaactctaaaccccaggcggagggggcgtggccttctggggtgtgcgggctcctggccaatgggtgctgtgaagggcgtggcccgcgggggcaggagcgaggtggcgggggcttctcgcgtcttttcccccagccccgctccaccagatccgcgggagccccactgctctccgggtccttggcttgtggctgtgggtcccatcgggcccgccctcgcacgtcactccgggacccccgcggcctccgcaggttctgcgctccaggccggagtcagagactccaggatcggttctttcatcttcgccgcccctgcgcgtccagctcttctaagacgagatgccgtcgggcttccaacagataggctccgaagtaggattcatcatgagggggcggggcgggggggcacgggtcccgcttttcttgggctggggtcgcggttggggtcagctgggggtggttcctgcgcaggcgcagggggtgaaggtagggggctggctatttatacccggcctggacaacccgtgactgtgagattccaatcctaccaaaaggcagagtgggtctggagggcctttcggggcacaggcagcaagtggattctgcgagccagggttcacccccttgcctagtaggcggcgcggcgctccggaatcggggacaccctgccctcgatccgactcgggaaagcagatccaggcgggtcttgccctccgggagctgtccgtccgtcttcgctcacgggcagtgtttcgaggaccggaggctctccgtgggcccccacccccactcctggccgccctccaggacgctgaactttcccttggccccat

SEQ ID NO: 13119 - DNA, 1185 bp, Homo sapiens
atagagaggtctcaaaggtgggggcaggaaagcagaagactgccaatcggggtaggggcaactgccagtccgagtaggggcagttcccagaaccgcctgaggagcagtgcagcgcccgaccagcgagaacctccgaccctggagtctaaccagctcagtctttggggcagagccgggacagcgggcttggcggcgggcaccgcgcccggccgcgtccgagctccagccaacaggaagagcaggagtggggccaggagaggcgggccagctggccagtggggagtcccgggcgtgggtgtggggagcgggggaacccccgccggcccctcccaggccccagcgggcggagggagcctccccaccgggcctcagcgtcctcctctgtaaaatgggccccttctgagggctggctgcgcgctaatggcgggaggatgcgaagagggccaggcagggcagagggaccgggagactcggtgtcccgcgcaggcagaggcggagggacgctgtccccgattgcagctggcggggcgaggcctggcagggcgaggcctggcgggggcggggcctggcgggggcggggccggcggcacctgggtgaggtcgctcggccccgccccctcgcacttccgtgtgccgcggcgccggagcccgaggcggctgtagcccacatctcccgagcgacccccggcgcccgcccgccgcgcggaggcccgggccacacctcactggccgcttggcccatcccagtcagcgccgcgccgaaccccgtccgcgcgcgccggggagcggcgcccccgccgctgccgccgcgacccttggcgcctgcccctgcaacgggaggtaagtgagggccgggtccgggcgcgggatcggggctaccccgagggcgcggcgcccttccttcccccttcccgccccagttcccgtttccgaaactgagaaactgagccgcggtcagcgaaagtcccgccgcgccgagacctgccggtgactccgtccccctgtccgtctgtgtgtccctccgctagacagtgggggctgaggtccttctgtctgcccgctcccggcccctccacccgcccgtgtgtctcccgctcctccgaggggcccgtccgtccctcccgactctctcccgggccctgtgtccgtccgtctgtcgccacccactctgtgttctccccctgc

SEQ ID NO: 13120 - DNA, 1184 bp, Homo sapiens
aagtttaattcacgcagagccagctgaacggcagacaggagtttggttattcaaatcagcctaccagaaaattcggagactggggtttttaaagaatgacttggcgggtagggggccagggattggcgaatgctaatttgtcaggtgggaggtgaaatcacagggggttgaagtgggctcttgctgtcttctgttactgagtggaattgcagaacttgttgagccagattatggtctgagtggcgccagctagtgcatcggaatgcgcggtctgaaaagtatctccagcaccaatcttaggttttacaatagtgatgttatccctgagagcaattggggaggtcaggaatcttatagcctctggctgcaagcctcctaaatcataatttctaatcttgtggctaatttgttagttctacaaaggcagactgatccccaggcaagaatggggtttgtttttggaaaggactgttacaatctttgtttcaaagtgaaattagaaattaaattcctcctgtagttagttaggtcttcgcccaggaatgaacaagggcagctcggaagtgagaagcgtggagtcatttaggtcagatcccttgcactgtcataactttctcactgttaggatttttgcaaaggcagtttcgtgaacgtacagagacaggcccttgctattatccctattttttagataaggatatccaggcgatgaggaagttttacttctgggaacagcctggatacgaaaccttcacacgtcagtgtcttttggacattttctcgtcagtacagccctgttgaatgttctcacggtggggaggtacgtgtttaaaatgcggggaaggtgcttttatttcacccctggtgaaactaggggagctaatttttttaaacatgatttttggcccccttgaaccgccggcctggactacgtttcccagcagcccgtgctcaagactacgggtgcctgcaggcggtcagcgtcgtttgcggcggcgcaggcgcggtgcgggcggcggacgggcgggcgcttcgccgtttgaatggctgcgggcccgggccctcacctcacctgaggtccggccgcccaggggtgcgctatgccgtcgggaggtgaccagtcgccaccgcccccgcctccccctccggcggcggcagcctcggatgaggaggaggaggacgac

SEQ ID NO: 13121 - DNA, 1183 bp, Homo sapiens
gtccatggatatttgggctgttaccaccttttggcaggtgtgaataatactgctatgaacattcatgtgcaggtatttatttgagcccctgttttccgttttcttgggtgtgtatacataggggtgaaattgctgggccctagggtaactctgcctttaactttctgaggaactgccagacttttccaaggtggcagcaccgttttacatccctgtgctgggttttactgattgcattatctcatcagtcctcacatcagagtcatgaggtttaggtagaattgtcatcactctcacttttcaaatgggagagtttgaactcaaagagtttctgcacgcagtcacacagccagtcagttgatgattctttggccagagctggctttgatcacgaaagcagtctcttctccaggccctgttttgtatcttcaggatgaagctttttgactgtgttgttcatgtcctatttcctggcgcctggcacacactgacactcacatatttgttgaataacatgtcattttttcctgatcttggtggcttgatcagtaacttgcaggagacagcatgtcttaggggatcctgtactctccaggttctcacactcctgccagggcctgtatgctctccaccccggatgctgcagaatccccgccagcctctgactctcaagcagctgcagacgcaccgcagtggaaataggtgtcatgacctctgcagagcagaggcaacatctgtttccagcgagtgcttgctgttaacttgacctgttctctcttctgggttgaaggctgctggtgacctgccctcttttttctcctctaggcaaaacccatttatggcggttggctgctcctggctccagatgggaccgactttgacaacccagtgcaccggtctcgggtaagggcatcagagccaactctcagggaggaaccagagaagggacccatctaagggtgaactggcagagtggaagagggagatggagagttgaacagtggatcctgggatagcaggaccagcagggctcccccatttggtgcacttgtacgttgtacagaaaaggtctcaattatacatagttgtgtgtagtgctcccttcagaatgaggagctctcatgtgggtgttgcctgttttgtgggtcaggttgactctaggaacagtaaaatggaagaggca

SEQ ID NO: 13122 - DNA, 1183 bp, Homo sapiens
caccatgcttcatctccaacactggggattatatttgaccatgatatatggaggggacaaacatacaaactacgtcaaaggcaaagcatggctactgtgaaagaagggtaaaaacacagagatggcatcacctctgacttccaggagtcctcagcagactgagggagacaagtacatattttcctgaaagaggtcactggagtgatggtgtgtttagaatatagaagtagagcagtcacagagaggcagcccagcagagtgttcgcacaaggactgggccagcaactccccactgcatgcaacgtatctgaggaaagtcattaaaataggtgatggtcactttccatcaagtccctggtatggtccatggaggcagggttgtcaatctcattttggcatttcagaggcctctcagggtttggatatggaagaagacaaccagcaatgattatgcattgcagagatgcaggtgagccccagtttcttgccagttgggaggtcagtgctaagagccttgctgtctttccctggaacatgagatgccaatttctttctggacagagagtatttggttggctaaagtcaaaatctaaattttgctttgggataaattccaaaaatattagcattattcaaatttactttcactttatctttccgaatcttcaaggtccaaaagcattgctgaataattctgtttctaaactcacttgcagcgtgctctccctccaaggcgaagaccataatctactcttgtctggaaatcatacaagtaggtatctcagcaaatgatactcgtgtgttatcgttcttatgagtaaatcattggcagtgagtgtgatttttttttttttatgaaaggataaatacacgccctctattggggtcaggttttgtgcctgtacttcttccgcctactgtatcatagcagcttagaatcccagctgctggctcgggctgcagttctctcatggctcgcgcagggtggaccagccccgttcctttatgtgtgtgtctactgctgacctgtggctttgccgaggcagggaagctgctggtagtgcccatggatgggagtcactggttcaccatgcagtcggtggtggagaaacttatcctcagggggcatgaggtggttgtagtcatgccagaggtgagttggcaactggaaagatcactgaat

SEQ ID NO: 13123 - DNA, 1183 bp, Homo sapiens
cctacatatagtacgtacccagcaaaaaatgtactcatctgcctaatctctggacactgtagcatcccagcgctcagcactgttatttaaaaaaataacaactttggctgggtgcggtggctcacgcctgtaatcccaacactttgggaggctgaggcggggggatcacgaggtcaggagttcgagaccagcctggccaacatggcgaaaccccgtctctactaaaaatacaaaaattttccggacatggtggcgggcacttgtaatcccagctactggggaggctgaggcatgagaatcgcttgaacccaggaagcagaggttgcagtgagccaagatcgtgccattgcactccagcctgagagacaagagcaagactccatctcggggggaaaagaaaaaaaagctttattgatatataacttgcataccatataattcacccaatgtgtacaattcagtagttttactatattaacagagttgtatggccatcaccaaaataaatttttttgaccattttcatagatgaacaaacagaattcgcaaactgctgcacccctgactatattataaaactccttacagggttttccaaagctataggaccacgtgatataactcccgtccacttctgccatctccccgcctaatctccctccacccaagctgtgctttccttggttccaggaaagcgacgagcttgaagctctttgcacatgcacatgccctgctgtctacctgcagtgctcttcccgcgcacggccacaggcctgggaggccgtccggttaagtacccctcctacggttccgattctaccctggcaggacaaccctagctcctcgtacctggcgtggcccgaccaatcgtctgccactcagttgacctctgacctgttagtacccgcccctggagcgccgcatccggtagcgagagttcaacttcctgactaggagccaatcagcggggccgcctcgctgtctacgacagagggtggggcagacgctccgtttccggtggcagggtctggggaagcggcggcaggcgccatgtccggccgcgaaggtaagtgttccggaaccgtgaggactgcggggacggcggggtggggaccgggcggcaggggcaggccgaacgtgctcgtgtcgcccacaggtggcaagaagaagccactgaaacagc

SEQ ID NO: 13124 - DNA, 1181 bp, Homo sapiens
caaagacaaatggctcttccagtgtgggtggaagaggggtgaggtcacccagtcctcagcctgtggtttgctttgcctcagtgccgggagcaatctcttgccctgatttgcattgtgggctgaggattcaggtcagtgagaaggccagtgatagaattgtctgtgtgggtgctgctgatagggatcagctgctgatcatggctagggctagcggctgagcacacgggcaccagcctactgctcgggcagcaaggcagcaggatggaggggtttgtaaaaatgccttccacctaccctgctgggcttgcccgagaggctctgagtgtgtgaaggggaagacaattatcgctaggctggagaatagaaagagcaccatcaggtgagaaagagaagaaaaaaagagaggggagagagtggataagaagaaggaagcctgggacacaagaacaagggctttgcttgctctagggctttgcttgctaaactcctagggagcacacaagtgagaatccagggcagagggaagcaggatgggtgccctgagtgcttggccccatttcctggggcttactggcctcgtgggtgggagttttataggctactgctccttggggaggcctcagtgattgaggatactcctgtatgagcctcggccctgaccccaggatgggggactggaggatcctaacaggattgggggttggttgggtgtaaccaaggtatctgccaaagggagagtaccaaggaaagcggaggcacctcctccctggctgtccttcaccccctctcccctccttgttctctgggagtggctggcgagcagcggcctccccgcagggccaggcaggtgggccagagcttttggtttgctgaggtttgtcagattttccagctcagggcccagccagctggcaggaagcaggacagaggtcacttgaattcagaccacatgtccctgttaaatacattagcttttaaatcaatctttgttcaaagtccagtgagttgcaagcctaatgctcacctgcagagacagaattcctgagtgaacgaacagagcagctcctcttccatctccaggtaagaactgctcgtgtcctccttgagggtgctggccaccggggcctgaactaccttctttcttttccttttccctttttctttttccaagccagtagctg

SEQ ID NO: 13125 - DNA, 1181 bp, Homo sapiens
cactcatgtgacaagacctgctcccacatcggtaatttggcacagctagtatttctccttgccaaaaagggcaaaggccttgagcaagaagccagctttttcctgattacaaaactgaccacaattcctcgccaacctaacagcgtaagtctatttttttctggtggtgtgttattcttctcatagagaactccattttttcattatgacatagcacttatcgtttaaacatcaattgatgttcaaacatcagctggtgtaacattgctgcagttgctattgatggataagctgaagtttttaagaaagcaaacccgatgtataaaattgaaaccatatcaaacccttcttcattctctcagctatttaattttacagaatttagatagcagtcagtatcattttgggcttcacaaatcagtagagtaagtaccttaggaatataacatttcagtagcatgctgataccaacgtttaaactatggatacatatttgaattccaaatttttcttcaaataatgtgattagagattcaaccaggaatagacaccgaaagaaaactttgcccaaataagctttctggtatttcataagcaagagatttaagttttccatttaagaagcaattgtgaattttacaacaataaaaaatgcaagtggatattgaacagtctctgctctgataattctaaatacagtacagttcacgcccctcacaagacactgaacatgtgggtcaccggcgagacagtgtggcaatattttccctgtaatgtaccaagtcttgccaaagcagtgaacattatgacacaactttttgtcacagctggctcctaataggacagtgccagccaattcaagcccagtcctttctgtgtttattcccatctctcccaaatatttggaaactgatgtcttgactcatgggtgtattcacaaattctgttacttcaagtctttttcttttaacggattgatcttttgctagatagagacaaaatatcagtgtgaattacagcaaacccctattccatgctgttatgggtgaaactctgggagattctcctattgacccagaaagcgattccttcactgatacactgtctgcaaacatatcacaaggtaaagttccttccagatacggctattggggacgtgggggcatttatgtaagggtaaa

SEQ ID NO: 13126 - DNA, 1180 bp, Homo sapiens
gagacggggtttcaccgtattagccaggatggtctcgatctcctgacctcatgatccgcccatcttggcctcccaaagtactgggattacaggcgtgagccaccacgcccagccagtttacctctacttaaaatggagagagtgcccagcacccttctaccttctcccttggggctctgcagattgaccgcacaaagattgaccacacagattgattgacctgtgaaaccccaaggcagaaaaagaagctttctgtgcccacacagaggtgttcttaaagtcagggttgctcttggcacacatattaataatcctgatgtctaggtaccattgcagatcctttggttcccctctacccgttccaggaaagactgcctgtcttctccgagtttcttgagggctgatgaaatatttcctgaatgtgatctcagaaggaatcccagttttgagggaccaaacaagattttttaaaaattaaatactactactaaatagctggtattgagttaatcctaagtgccaggcattatgcaaaacactttacatgcattatggcatttaatcctcactacaaccctagtgaaataaatatcaatataattaaaagtataaatataaatgaagtgttataatagtctcattttacagatgtggaaaatgaggctcagaaaagttcacgtgcccaagatcacacagctgctaaatgacagagccacgattcaattcacatagtcatctctagaggcaaagctctggtaaagggcttgatgactggtcactgtcgtcacgaacttgacctttcctgcagcactgcctggtactttcccagtacagtgttctgccctgacacagccaaggccaagggcagtgcaggcacagccaccgtgactctctgctgggaggttaacagctccatcagttcagggactgcctgacccagcctgaccaaattagagcaagtaatgggtgtgacataatttgacatgtacattgttaattgaacccaatgggagatgattttaaatagaggcgaataccacgctgtgaactatttgggttatgaagctcttattctcttatccttgcaggagaaagaattgtgccatgaaaaatggaaaactcctgagaagctgttccagcgtcaggagagcagcagacaagctggactggggaagattct

SEQ ID NO: 13127 - DNA, 1180 bp, Homo sapiens
tcatgggcacagagattaaggttatgaaatctggtcaaagtcagcacccatatgggaaaaggcagtttagtaggaccccaagttttgtagactgctctagacgtcgctcattctgcagctcatcctgaggaaaggctggcttctgacccaccttggttaactgaccaaacccctggggccattcttcttcctgataggggtccttgggatatgtcttcactggtgaacggtctccatggcggtacagctgagagaataaaatggtttgcctataggtcagaagcatccccttgatagggacccagagcctaccttttgccccatgttagggaaggaagtctcattccctctgggaagcctactggctgcaaaagaccccagctaggagtcagtcacttcttccagattccagagattctaacttagctaagcaatgctactggagaccataggcaaagccaaggtacaggtaggaagggaaaagagaagtgaaagcaacgtatgtggtggggacaactggggaaaaaagataaccaaaggcttctttagggatgagtcttaaccattcaaccacttccctgtctcaaggcagactcaccccgacgtattcggtcatcctgactcccataagccagggctccaggtcaatcctgaatccagcctcccaactacccaggccagtcgtcccctcctaaaccagctgttccttcccgagatcctcgacctccaccagctggcctttgcccttttagcttcagggaagtctttggtgagcccatctctcattaccaaggtaacgaagcgcagactccgggcccgggtgggcggcatcaccaccaggttcacgccgagaaggagctggaggagagccgcccggctccagccggaccgcttgcccgccatcaccgttgtaatctatgcagcaaacaagctggaacccgctgggtggcacctgcaagcagccgcccggacgcacccgtaaggacacacgccggaagtgcgttcgccgccatcttacttagggacctgctggggtgcggggaaaaggcgcagtctcggtgggattgcgtgcaggagggtcgtggtctggctgtggcggaggagcataagaaggtaacgcgacctggcgcggcagacagggctcgaagacctcatcttgattaagaaggccacaaattcg

SEQ ID NO: 13128 - DNA, 1179 bp, Homo sapiens
tgtgtgacttgagcacattccttagcctctctggccctctgtctcgcagtctgtaaaatgaaaagagtgaaccactaaagatccatgagcttctttcaaactctaaaaatcttggtgcctctgaatgctcaagaaagttcttcccaaacctcaacaggaactcctttttcttttttttttttttgcagttctcagcagcagctcagctggaacttagccggaggtgctaaggactccttttgcaatagcccttcctttacttcttttgactctgaggatcagaatagggtataggtttgggatcacgagtcagcccaatgtttcttggaacagtttccattcagatagttatgttttatttcattgactttgatgtgttgcttctggcactttattgttttcaatagagggcaattcatgatgtgcataattaaaggtcatttgattttcatttctttgttaagagtttcataaaaacaaacagagttcaggagaaagcaattgccagaccatgcgcccagagaccatgtgccctgatttgggatttggacacctggtccttggagatgaaggttcccactgtcctgccataggtggggctctgcccctggcctggaacgtcccctgtggggatagggtcatccctcagaaggctctggagcatctgtttcaggggctcaggtcaacaggaccaagaccatcctctcaaggctctgccctttctctcagggcccctctgaagaagtagctcagaacactcctctgcttctgtgggggcagtttcatgagtaaaggcagcttcaggttcccggtatttggaatttggtattcgctgagtaactgggatggcctcgatgaggggcagaggaacaggtctggctagttctgtgttgtttatactggggattacttcacacgtcccaaccggcttccccgccccatttggtgggggctggcccttggccctccaactcctttaccctacatgcctgagaagccagggaccaagatggatcttctcctcgacatcagctaagcctggaggactcttcccctcagagaccatggagagggacagccacggggtgagtgtgacctcaggcctcgggccagattctcccagcgctgaggaagcagggctgaggctgggagacaggtgggacagctacctctgtgttt

SEQ ID NO: 13129 - DNA, 1179 bp, Homo sapiens
gagatgagccagaggatggaatgccacaggccccacttcgtctcccagcccttcatctttcttccatgtccaaaggcggctccccagaggccaagggctcagctcttgtgttctctgagactgtggcacagctcaccctggcttccttagtaggaagcttttaagaactgctctgtagaaagaacaaaccctaatctagctccagcaaagagccaggatcatgctgaacttcctgtgagccttcgtgggggatcgaggctggagaaagtgctgcttcattctgaggtatctgtgaggtggggaaggggcaggaaaatttgtcatttcggcttcctaatctgagaatggtagctccagggcccccctgtagccacagccttaggcggatcaaaaatgagactaatacaggtcctggtaatactgggggtgaccaaggcgaaagaatcgatttttaagttaagttttgaggtgtgactgtatcagagggaaagaaaccatgccaattgaacgactcacagccctgtcgttcctgacttgcttattttcttggctttgccagaacttcttcagagaccaaggcaggcagctctggcgactggagagaggcggggtagaaggtgtttgtgtgggtctgagggctgaggtaccctctagccagactttcctgtcctccgaatccagcagggaacagcgtcacctctgcctctgtgaggcttctgatctgagggggcacctcaagtcattttagtttgtttgttttcatcttagttgaaagatgataggccacaggagggcagggtcaactgtgttgaggcaagctggcttttgtgtcggcccttaggggctgaggtgaaaggctttgacacggagccagggtagctttggcagcttctcccctcctggtcagaacacttccactttcagttgtgaaaaaaaaaattaaaaccaggaagtgaagtccccgagcacgttagaaagcctgacatggcctgactcgggacagctcagagcagggcagaactggggacactctgggccggccttctgcctgcatggacgctctgaagccaccctgtctctggaggaaccacgagcgagggaagaaggacagggactcgtgtggcaggaagaactcagagccgggaagcccccattcactagaagcactgagagatgcgg

SEQ ID NO: 13130 - DNA, 1178 bp, Homo sapiens
ccagtgttttgggtagttttgctcccctacagccaaaggcaaacagataagttggaggtctggagtggctacataattttacacgactgcaattctctggctgcacttcacaaatgtatacaaactaaatacaagtcctgtgtttttatcacagggaggctgatcaatataatgaaattaaaagggggctggtccatattgttctgtgtttttgtttgtttgtttctttttttgtttttgtggcctccttcctctcaatttatgaagagaagcagtaagatgttcctctcgggtcctctgagggacctggggagctcaggctgggaatctccaaggcagtaggtcgcctatcaaaaatcaaagtccaggtttgtggggggaaaacaaaagcagcccattacccagaggactgtccgccttcccctcaccccagcctaggcctttgaaaggaaacaaaagacaagacaaaatgattggcgtcctgagggagattcagcctagagctctctctcccccaatccctccctccggctgaggaaactaacaaaggaaaaaaaaattgcggaaagcaggatttagaggaagcaaattccactggtgcccttggctgccgggaacgtggactagagagtctgcggcgcagccccgagcccagcgcttcccgcgcgtcttaggccggcgggcccgggcgggggaaggggacgcagaccgcggaccctaagacacctgctgtaccctccacccccaccccacccacctccccccaactccctagatgtgtcgtgggcggctgaacgtcgcccgtttaaggggcgggccccggctccacgtgctttctgctgagtgactgaactacataaacagaggccgggaacggggcggggaggagggagagcacaggctttgaccgatagtaacctctgcgctcggtgcagccgaatctataaaaggaactagtcccggcaaaaaccccgtaattgcgagcgagagtgagtggggccgggacccgcagagccgagccgacccttctctcccgggctgcggcagggcagggcggggagctccgcgcaccaacagagccggttctcagggcgctttgctccttgttttttccccggttctgttttctccccttctccggaaggcttgtcaaggggtaggagaaagagacgcaaaca

SEQ ID NO: 13131 - DNA, 1178 bp, Homo sapiens
gcctgtcttcaaatttctgctctagttaagaaacgatctcaggccgggcacggtggctcacgcctgcaatcccagcactttgggaggctgacgcgggcggatcacctgaggtcaggagttcgaaaagagcctgaccaacatggtaaaaccccgtctctactaaaaatacaaaatcagccgggtgtggtggcgtatgcctgtaatcccagctacttgggaggctgagaagggagaatcacttgaacctgggaggcagaggttgcagtgagccgagatcgtctcaagaaaaaaaaaaaaaagaaaaaaaagaaacgatctcttcccttctcaaagttatatacatttcactattcgccaaccacctcctccacgccgtccagagctgagctgacacgcagcgaagtcctctcagtggtccctccgcacctcagccctgtgcttggcagcgagacgagtgacagggccgccccagcatgggtctcccgggccgcggacccgccccacgccgtatccagcacgctgtcctcccgccccatctttgtgccggccatcgtgtggtcgcgtctgcgcgctccgcccggtctgccggcgtgagaaagagctcgtgtcgttcccaagttcagaccagaggggacggcgaagcgcgaaaaagttccctgcgcccagtacgcaggcgcagccgtgctcctgggcttcccgggcctcgtcccagctggcgcgcccggcgctcctccgccagcgggcagttgggggcgctgcagggagggcacccgagcgggttgggggcgctcggaagggtggcttgcaaggtccgggtagctgcagtccccggagtggggcggagaggcgcggcaccgcgcggacgaggatggggcgggggcgggcgcagcccgagggtgcaggcacgataaggcgggtgacagccagcggggaggggcgggcgccaccgcgtccacgccctttgctcggggccgggccgggagggtcctcgggctttgcgcgcgcctggccggcgggctgaggcgtacgggtcgcacgcagcgccatgcgaggcccccctgcctggccgctgcggctgctcgagccaccgagccctgccgagccaggtcggctcctgccggtagcctgcgtgtgggccgcggccagccgcgttcccgggtccctatcgccgttcactg

SEQ ID NO: 13132 - DNA, 1177 bp, Homo sapiens
accttcctggtaccctcttcaaagtggccatcaggacgggaggccagactgaccacctgtgcagggaggagcacactgtggctggaggtcacctcgtgaagcgttcccaagccacctggctggagggtctccatcgctagggtgttgaccgttgggggagggggagtgacagcgtccagtgcgcatctgggagagaggagctcgggttcaaggaccgcgacaggtcctccgagccctggtctcagccccagcaggggccggcacccacctcggtcacaatggtggacaggtagacgtcctgactgaactcccagccatccagacagctctcctgctccagctgccccaggtccacgtcgcgccccggctccagcccaagcgccgagaagttggcgatggtggcgagccggtagcggcggcagctgtggggcacctcgcggccgtcccgcagccgcagtgggacagtgtggttgcgccaggcgctgctcaggttcgcggcgtccggcacccggcagcggtgctccggggtcgctatcaggaacacggaggacaggccggtgaagccattggggatgatgctggcgctgagcaggaagaagatgaggcgctggaagggcccccactcgcccaggaaggcggtcacctcgtcgtagtcccgcatgccgccctcagaggcccacagagcgcggcctggggtcggggaacgcggcgggctttgcgcgtgcgcgcggggcacccgccgccgaccaggcaagccaggcagcaggcgacccaagaccgtccgcggagggtaggctcgcgagctgacaccgccgccttggtcctgccgcggctggccttacatagggcgcacgaccagggaaggttgcgggcctgggccgcaaggcgcgccccgctggcaggcagagcggcgccggcgaaggcggagctggggcgggacgcgagggcgcggggcgggccgggagtgcacctgaggcccgggcggggcctgtcctggggacctggcgaggcccggcctctgccagccaagcctgctggggacgaccgaggtagcccgggctcggcttaggaaggcagcgggactcgaggccttggggtccgagtccgaactcgctcctctagcgccgggcggggagcgagtgggagagcggccgcgaagctccagtgttgaaaacgc

SEQ ID NO: 13133 - DNA, 1177 bp, Homo sapiens
ggtaaaggaggaaatcaacacccatctgtacggagataaacgtttcagagtgtttttatattaaataattagtatactagtctagtaagtgataatccacgaataagttaagaagagctaagaaagaaaaagaaaagcatccatccatcctttggttgcaaataatacttacattagcgtatggcaaaatttaattttgtacagagtaatttaacccaggattgctgactttttaagagctgagaaagcatagctatggagcgcaaggccccacccagcagggtctaagtattccgtctgcaaaactggcaggccaccaacggccgcgtcccagggcggcctgaaggatgctgataaccgggagccccgccctgggttcggctatcccgggcaccccgggccggcggggcgaggctctccaattgctgggccagagcgggacccttcctttccgcaccctcctgggtatctccggtcttcaggcctccttcggagagccctgctccgagcccattgggcttccaatcttggcctgcctagcgccgagcagccaatcagaaggcagtcctcccgagggggcgggacgagggggtggtgctgattggctgagcctgaagtcgccacggactcggggcaacaggcagatttgcctgctgagggtggagacccacgagccgaggcctcctgcagtgttctgcacagcaaaccgcacgctatggctgacagccgggatcccgccagcgaccagatgcagcactggaaggagcagcgggccgcgcaggtacactctgtgctccccgagcgggcccgaaggtccgtttagaaagcgggggcgtcggcaagtaaaggcccggcttcccccggggcggcgcttggagggactgtaccgcggctcactgggcaggggggatccccttcggtgcagacggacttttacattcgccgaagcaggggaggggggtccgggtagtggggcgcgggactgcaggctttgttgtccgcgacaggctcgggtggttgcttcagaattttgcacttttgccaactgggacagaggtcgcagcttgaggacagattgagggctcatggggaaagaggcagagagctgcagctgcaaggaagtcagtgaggggagaagtggaaccaggctctaatggtgcccttcttgaaatactgt

SEQ ID NO: 13134 - DNA, 1177 bp, Homo sapiens
ctgaggtgggaggatcacattagcccaggaggttgaggctgcagtgagccgtgattatgccactgcactccagcctgggagacagagtgagaccctgtttcaaaaaaaagagagagaaaatttaaaaaagaaaacaacaccaagggctgtaactttaaggtcattaaatgaattaatcactgcattcaaaaacgattactttctggccctaagagacatgaggccaataccaggaagggggttgatctcccaaaccagaggcagaccctagactctaatacagttaaggaaagaccagcaagatgatagtccccaatacaatagaagttactatattttatttgttgtttttcttttgttttgttttgttttgttttgttttgttttagagactggggtcttgctcgattgcccaggctgtagtgcagcggtgggacaatagctcactgcagactccaactcctgggctcaagcaatcctcctgcctcagcctcctgaatagctgggactacaagggtacaccatcacacacaccaaaacaattttttaaatttttgtgtagaaacgagggtcttgctttgttgcccaggctggtctccaactcctggcttcaagggatcctcccacctcagcctcccaaattgctgggattacaggtgtgagccaccacaaccagccagaactttactaattttaaaattaagaacttaaaacttgaatagctagagcaccaagatttttctttgtccccaaataagtgcagttgcaggcatagaaaatctgacatctttgcaagaatcatcgtggatgtagactctgtcctgtgtctctggcctggtttcggggaccaggagggcagacccttgcactgccaagaagcatgccaaagttaatcattggccctgctgagtacatggccgatcaggctgtttttgtgtgcctgtttttctattttacgtaaatcaccctgaacatgtttgcatcaacctactggtgatgcacctttgatcaatacattttagacaaacgtggtttttgagtccaaagatcagggctgggttgacctgaatactggatacagggcatataaaacaggggcaaggcacagactcatagcagagcaatcaccaccaagcctggaataactgcaagggctctgctgacatcttcctgaggt

SEQ ID NO: 13135 - DNA, 1177 bp, Homo sapiens
catcatccggtacattcagacaagtttcagggaaggatcctatttgtcccatgataatgatgggcaaggggtggggagttatctcatactccgcctgtggatgaggggtcttctcaggtaaggctcttaaatcctaggcctgagtaaattttttcaaattttattttagacagggtccctctctgttgcctaggctggagtgcagcggcacaatcacagctcaatgcagcctcaacctcccaggcccaagtgatcctcccacctcagcctcttcagtgactaggactacaggtgcatgactccatgcttggctaactttaaaaaatgtttgtttgtttgtttgttttttacagagatggggtctcaccatgttgcccaggctgatcttgaactcctgggctcaagtgattcccctgcctcggcctcctgaaattctgggattataggcttgagccaccatgcctggctctgagtaaagattaagggaagccatggtgctatcgcaatagggtaccaggcagcttaacaaaggcagaagggaacctcagagaaccccgaagagccaccgtaaagtgagtgctgggggagctgaacttcagtcagtacaggtgccgaacagccatcaggtgcgcagtgttagtaattccaccctctgccctgggagcaaggtgtgtggagaaacctgtagcactttatgaccatcagaaccagtctttttcaaaaagaccatggagtactctttgacctgtgtatataacaagaacctttctcaaataggaaagaaatgaattggagaaaaccactgtttacatggcagagtgtgtctccttcgcacacatcttgtttgaagttaatcatgacattgcaacaccaagtgattccaaataatctgctaggagtcaccatttctaatgattgcctagtctattcatagctaatcaagaggatgttataaagcatgagtcagacagcctctggctttctggaagggcaaggactctatatatacagagggagcttcctagctgggatattggagcagcaagaggctgggaagccatcacttaccttgcactgagaaagaagacaaaggccagtatgcacagctttcctccactgctgctgctgctgttctggggtgtggtgtctcacagcttcccagcgactctagaaacac

SEQ ID NO: 13136 - DNA, 1176 bp, Homo sapiens
catctgtcctaaccgttttctccaccctcaatacagcttcttgggaaggctggtttctgctggacaggggaaaaacacctcggcttgaattctgtcaaggtcacgactccccagatcaaccaaggactttagagaccggcctagcgacggtcactcgacaggtgacaacgcccagctcgagcctccggcaagaggcgagcgccacctcgctcagggcttcagttttcccgtctgtgcaatgggaccatctgtccctctccgcttccccaggggaggctgtgagggctaaaggtgtcggcagtcacatctctcaaacgaatttggggccgcagagttcctttcagggtgtctggaactgccaaatcgcccctgtccctcccactccttaagaggacccctcaccgcctcggtgccaccgtgacgcctcagccatggcggacctgcactacaccgcccgttcgttcgcctgaggccgcggcgcttgcgcgctagtcttgcggcgcgcgctgcccggctctgacgcctgcgcgagcccccagctcctccagggcggcgagctactcgacaagtcgtcagcgcggctgcgccgcaggagcccgggaggcctttcgcccgaggcgggctgcgggctgctggggtctggtgcggagggccaacttctgggaataacctggctgtgggcttaaaaatcgtagtcattcattatcacgggcttctctctctcgaatacctttaacatttatcgccttgttagtctccacatccacctccgtgaaaggtaggtatttttgtcctcattttaggcctgaagaaaccgagaagctgagaaatgaagtaattcactggaagttggggccaagtcttggatgcccaagcccaaattcctaaccgtgaccctacgctgctgctgctgctgctacttgcagaaactggttattaaccgagagctgttgctggaagtagcttccactcccctgcccccgtgatgtaaaaatagatgaaaaactctgcagtgattatgtgaaaggtcaggccgacacaggagtcctggggcccagacccacatctgacccagaagctttgcaaagatgagaaggttggtaaaccagctatagaaaaggccaaactaatttggctgtaaattaaggcagccaaaagccctccaggatgtaagac

SEQ ID NO: 13137 - DNA, 1176 bp, Homo sapiens
tcccgagtagctgagattacaggcgcacgccaccacgcccggctaatttttgtatttttagtagagacggggttcggatgttggccaggctggtctcggactcctaagctcaagcgattcgcccgcctcggcctcccaaagtgctgggattacaggtgttagccaccgcgccctgcctacgcccacttcttactataatctttccattcactagcggcttctctgatcccatttcctcttcgaacctgagctcaaaccagcctgggtctgaccggccaatccgagcgcagtcttccgcagtcgcgagtacggctgcagccaatgagagaccggggcgcctcggtggggtgagacagggcgctcactggcggaaccccgggggacgcggtgatgggaggagtgtgggaggggcagtggaactggagtcagctaatggctgacgcactacgcgcagagggaaagacgggtcaccaatagcgacacggatatggccccgcgggcggggtttaggcccaaagtggtgtcggagcagcgcctattagtgtcatcctcaccgtcacggccggcgcctcctcctggattcattcactcgctcttttcattcacgaaggtagtgaggcctagtggaaagccatggagagcgctctccccgccgccggcttcctgtactgggtcggcgcgggcaccgtggcctacctagccctgcgtatttcgtactcgctcttcacggccctccgggtctggggagtggggaatgaggcgggggtcggcccggggctcggagaatgggcaggtgagtcggatgcagcgccgcgtcctcgctcccgcggcggcccggaccaggcctgggccgtgatgactagttctggggtctgctcctggccttcccctccccagctctcctctttctcaggctcctgtgccccgcgggcccctcctggctcccttggctgtcttctgcttgcttagactacttgcagagttttaaggtacgaaatacactgctcgctcaatcctgggaatctaagctcagcttagggtgtaggagaaaactgccttaagtctctggggcttgtgccctttaagccattccgtgttcatggagccagtcagtcgccctgctgcctcctcagtcacacgctgtcctccttggttcgccccttgtaagtgttttta

SEQ ID NO: 13138 - DNA, 1176 bp, Homo sapiens
tagtatttcttggagagacggcgcgtagcggagggtagggcggagattttctatctgctctgtctctgcattgctgggtttccagctcccaacctaaccccgcctccccgaacgcggagacggaactcggcccccttgtttggggggcggcagccacgtgttcacggggactgtcgtgcgcgccgggttcgcagccgtgcgagctctgaacccacccgtggagctcctgtcgcgggaaactgcgggggaatggcttggtacgaatcacgggaacccgtagcccggggcgggtcaccgcctacaagcaagggctggcgtacgctagagaccgaagagctggaggccccagtggccccctttcacagcagtagcaaatattgtttgtttagtaaatattggcctagtgactctgccttggtttccccacttgaaggaagcagatagaacagtatcctccgaggagtggaggctggggatcggtgaattattgataaaaggagagctcttaacctagcctggcacgttgtaagcgctgttagcatgattattggtgcagaaaacactcattagacacacctggtaaatgctaagaacagtggccacaggggatgttcaggctggaaccagggtcttcccctgtgtgaagggaaacttgctgcccacgacccactggggcctccagacgggagcatgtgggtaggccgtgagctccacccccggcccccctcccttgggccaaggcgctgatgcatcggcggggctcagagaaaggagcccacccagaaagctcagcgtggagtcgggggacgctcctcctcgccagggttcccgtcccctttccctgctgggtaaatcgcattctgtctctttaaggagtgtttggccgcgacgagttggaaagcccggatgcgtccttcggttgggcggggtgtctcagtgacgtcactgggggtataaaagggcctgggtggcgggcgcctgggcagagcgtcctagcagtgtcactgcgtgggttggtttgtgtagagaggcgtgagcgagcccgttgtccggagtgcacctgctgcctgttctgtccctcccgggagcccccgccgctgtcgccgtcgagtcgccatggaagtgcagaaagaggcacagcgcatcatgaccctgtcggtgtggaagatgtatcac

SEQ ID NO: 13139 - DNA, 1176 bp, Homo sapiens
gaggattgctggaaagttcaggcattcgagaccagcctgggcaacatagtgagacctcatctctacaaaaaattaaaaactaaatgggcacgatggttcatgcctgtggtcccagctactcaggaggctggggtgggaggatctcttggcccaggagttcaaggctgtggtgaactaaggtcacgccactgcactccagccttggcaacagagtgagaccctgtcaaaaaaaacaaacaaaaataaataaaacaatgaacttagagtcagacaagcaattcaacatggaagaaagacagcccatcccctcccaattagtgtggaagatccatgtaggtgtggagtccccctccattgacctggtgtctggtctgtcaatgtaggtactacaaacctggcttgctgatgatgtgcttcatcctgcccacgcttgtgccctggtatttctggggtgaaacttttcaaaacagtgtgttcgttgccactttcttgcgatatgctgtggtgcttaatgccacctggctggtgaacagtgctgcccacctcttcggatatcgtccttatgacaagaacattagcccccgggagaatatcctggtttcacttggagctgtgggtaagtcagctgtccaagtaagactacatccagtggtctgctgattaggggattaggctaggagccagaaaaactagataaatctgttttttatggctactttgtatctcagtttttccactataaaattagggggcagtatactggaaaacgcttttgagagtcaggcaacatgttttatgtaaaaatgaaaggataagaaacaaaacacaaaaaaacactgattttgattccaggttctaaaacaatttccaaatgccatgtatgctccgggcccggcggctcatgcctgtaatcccagcactttgggaggctgaggcgggcaggtcacctgaggtcaggagtttgagaccagtctggccaacacggtgaaaccctgtttctattaaaaagcaaaacaaacaaacaaaaaagaaaaccaaatgccatacatgatgagcaccttagagttttcctttctttcatcaactctgggctggactgcagtcttgcttgaggcaaggaatgcataaatagaacaatgggatcatctgagtggccagtaagcctggtgttttatg

SEQ ID NO: 13140 - DNA, 1174 bp, Homo sapiens
cctcctgatagatccctgtgatgccaggcaggaatgagccgcttgggtatccagagagctcccagtgcctttctgctacttcctctacccctgtattttgcttggcttggttctctaatttgactcagcttcacataaagtcaggaacttctcctgcaaacagaacttcagcttctccagtggggatgtgtattctggagagggggatcaccctttcccacttccattgttggggcactcacagtgtttgggatgtctcccaggtcctgcaggagcagtactcttcctgcagagggtgtgtggatcctctcagaattgctggtctgttcttgcagttgatctgcagctaaaattcacaatgcaagcctctgcatgctgctctgtctggagctgcaatctagtcctgcatcccatctgccatgatcactggaaaaccctcatttattttttaaagggtccagaaaatgctaatctatagagatagaaattagattagtggttgcctagggtaggatggatgcaaaatttcagagtggggggttagaggctattgtatagaatcttttggagataatactgattattgtagtggatgtaaaattctgtgaatatactaggaaacattgaactgtacacactaattggtgagtcatatggtatatgaattatgtgtcaacaaagttttagaagacattacttgcaccacgatattaaaaaatgccgtttgagttgtataattacttcttctctctatgtcaagggcaccgaacaggcaggagcctctcacttgccactgttcttaacagtattataaaataattacataagacaggttacttacatattctaggtcataaaaattattgcttgactagagtaattgtaaacataaaagaacaccaaacacactaaaataaatatgaggtcatcaatcttttgttggtctccttggcatgcacctattcagactgttagtattatgtatttacttcaaattttagcagttatattttaacttgattgatttttcctcagatataagtatgagaaatgacagaaagaaacaacaactggaaaagaagcattgcataagaccaggatgtctctgaaatggacgtcagtctttctgctgatacagctcagttgttactttagctctggaagctgtggaaag

SEQ ID NO: 13141 - DNA, 1174 bp, Homo sapiens
tacttggcacaggctggtttaataatccctaggcacttccacgtggtgtcaatccctgatcactgggagtcatcatgtgccttgactcggggcctggcccccccatctctgtcttgcaggacaatgccgtcttctgtctcgtggggcatcctcctgctggcaggcctgtgctgcctggtccctgtctccctggctgaggatccccagggagatgctgcccagaagacagatacatcccaccatgatcaggatcacccaaccttcaacaagatcacccccaacctggctgagttcgccttcagcctataccgccagctggcacaccagtccaacagcaccaatatcttcttctccccagtgagcatcgctacagcctttgcaatgctctccctggggaccaaggctgacactcacgatgaaatcctggagggcctgaatttcaacctcacggagattccggaggctcagatccatgaaggcttccaggaactcctccgtaccctcaaccagccagacagccagctccagctgaccaccggcaatggcctgttcctcagcgagggcctgaagctagtggataagtttttggaggatgttaaaaagttgtaccactcagaagccttcactgtcaacttcggggacaccgaagaggccaagaaacagatcaacgattacgtggagaagggtactcaagggaaaattgtggatttggtcaaggagcttgacagagacacagtttttgctctggtgaattacatcttctttaaaggtaaggttgctcaaccagcctgagctgttcccatagaaacaagcaaaaatattctcaaaccatcagttcttgaactctccttggcaatgcattatgggccatagcaatgcttttcagcgtggattcttcagttttctacacacaaacactaaaatgttttccatcattgagtaatttgaggaaataatagattaaactgtcaaaactactgacagctctgcagaacttttcagagcctttaatgtccttgtgtatactgtatatgtagaatatataatgcttagaactatagaacaaattgtaatacactgcataaagggatagtttcatggaacatactttacacgactctagtgtcccagaatcagtatcagttttgcaatctgaaagacctgggttcaaatc

SEQ ID NO: 13142 - DNA, 1173 bp, Homo sapiens
tgttgtagtgtgaaagcagccatagctgatagttaaattagtgtatctgtgttctagtaaagttttatgaacaatgaaatttcaatttcacataatttttacatcataaaatattcttttgctttttttctcaaccatttagaaatgtgaaccctttgtcagatgagtaggttgcaaaaattttctcccattttgtaggttgcctgttcactctgatggtagtttcttttgctgtgcagaagctctttagtttaattagatcccatttgtcaattttggcttttgttgccattgcttttggtgttttagacatgaagtccttgcccatgcctatgtcctgaatggtaatgcctaggttttcttctagggtttttatggttttagaaggggaacatcacactctggggactgttgtggggtggggggaggggggagggatagcactgggagatatacctaatgctagatgacgagttagtgggtgcagcacaccagcatggcacatgtatacgtatgtaactaacctgcacaatgtgcacatgtaccctaaaacttaaagtataataataaataaataaataaataaaaatgcaggaaaaaaaatattatcatgaaaaaaaaaaaagaaatgtgaaccaaaaaaaaaaaaaaccaaaaacacctgtcttagtttacaaaccataccaaaacagatacaaatggaaatttgtttgagggaagtggattgattcatattttgactgagaattaaataaggccactgtaccttggagggattttagataagacatctaaaatagtaggtcatggtaaagggtgggagagaacagaatgaaccactgaatgggggtggctgtagggaatgcctttaaggaaacaccttctccctgctatgtgacccaccagaattgaacatggggaaatgatgagggtagcaggtcattttgaaatggaccttcgggtagtatttggggtggaaaaatcccctttctccaaccacattttggccaccccagcaacaccacccccacagaggtatcagcgctttgtgatgtccaagccaccccaagactaccattggatggggtgccccattctgaccaaacaaagctgaagggtagggctcctcattacccaggggtgggtatacataaggaggtcaggagcataggg

SEQ ID NO: 13143 - DNA, 1172 bp, Homo sapiens
cagcaggtactgttcagtgggatacacagtgtagcgatgcatcactctgaaatattttagtttctttttttcccctaaatctgggtatgttcgtgggaatttgcagcacatgtgaacaacttctgtcattcttgcatgaggcaaagggaattgaaaaccacgattactttagaaaactagtttcacagattggtcactgtataaaagaaggatattggttttggtagcttgtgaccacacaccatttctgatctgaataaattcagaacttataatacagttcagaaattgaatgcagtttctcaatatgaggaaagtattttagaataaggcctatttttcaaaggatctgtggaaatcaatgctatgctctcatttaggagatggaaagagtgaggttaaattatcatttcgattaaatctacagtccagattactggtggatgaattgaatgtacttttttattcatataaaacatttgaaatcagaaatctggagtacttttaaatcccattatttattttgttttaatcgccaggtaattcctgagacaggagtgtcccgaagagcctttgcaattatgtaagaatctccgaggcagttcttatgttcctcaattcaaaagaaccacataactgcaatttaaataacaccccacacacacacacaaaataaggtcgaagtttatctcaaaataatttcccctctctacactgggataaatatgtataggaataatagggggaaattcagtgcactgagcattaagctgtcaaaacaggaatgtttaaaatatcctgttagtggtttaaaaataatttgtactctaagtccagtgactatttgccagggagaaccaaagttgagaaatttctattaaaaacatgactcagagaaaaaaatgcagaggccggtaatgaaggaaatgattggatctcattcccaattggtcattcctaagatcacatgttctgagcatctttaaaaggaagttatctggactcaagagggtcacagcaccctcctgaaaactgcagcttccttctcaccttgaagaataatcctagaaaactcacaaaatgtgtgatgcttttgtaggtacctggaaacttgtctccagtgaaaactttgatgattatatgaaagaagtaggtaaggaaatgcgttgtgg

SEQ ID NO: 13144 - DNA, 1172 bp, Homo sapiens
ttgctccaagggttcattaaaaaatccaccagtggaccgggcgcggtggctcatgcctttaatcccagcactttgggaggccgaggcgggcggatcacaaggtcaggagatcgagaccatcctggctaacacggtgaaaccccgtctctactaaaaatacaaaaaaaattagccgggcgtggcagcgtgcgcctgtagccccagctgctggggaggctgaggcaggagaatggcgtgaacccgggaggcggggcttgcagggagccgagatcgcgccactgcactccagcctgggggacagagcgagactccgtctcaaaaaataaaaataaaaaaaatagaaaaaacaatccaccagccacgataaatggcagacctccttctgatttcagccggtgtggtatgttcctgggctgacagcacttgtctagtcttgctttcccaagtgggaaaggtctctgggaccttaaggtccccaggtggtgacacagagacaggtaggggggcccatagcaaagccaggcaaggaggtcccgagatgattgtgggtggcagggaaagaaaaaatattccttgactttgtgcctggacctggttgtaataaaggcccaagaggtagttcctatcatcgtgcacatttcgctgaaggaagaaactgagggtcagtgacccaagtgaagtgacttgcccaagatcatgcaggaagacatggataattgtaatttgaaccaaggtcccagcaaagtgggattgttggggctgagtgggccggctcctgcatttccttccctctccctgggcttgggtctcccacttgtccagacagcggccgggcttgtcacggggctctgtgcagccttttccactctcccggctgccagcgtcccgccccgtcccctcccagcccccaagggaggaggggagagctgcagagaggaggaggggtcggggaggccggctttataaaggcggctggaacaaccctgcccgccagaccccgtcgcccggatcccctgagctgcccgccatcccacgtgaccgcgccgccccccagctccaccgctgagtgagttggggcgcgtccctatcccgttcccagtccctcgccgagccgcgtggtgcactgaagccggcgtggggaggagagccgatgaaggagaacgctaacatgg

SEQ ID NO: 13145 - DNA, 1171 bp, Homo sapiens
ttaaacagctggcagagaaaaggcagccctggaggaaaccaacagacaacagcagatggggagaagaggaaagagtggcgttaccgggagtgaaacgaatagaggagccagggaggatcagagggagggaaaattgtgtggaatgcggtacagaggtcagaaaagagtccatttgatttggcggtaggtaatctttcccagagcagtttcggtgttagtggttcaggcgggaattccaatgcaagaaaccagtgaacgaatgagagagtgagtagggaaagtgaaggtgagtacgttaatgaatgaataaatcaagtctgtaccctctcttgcccgggggatttccagggccaatgtcgcactttggtgaggaggaaaggcctggtcacggcttggggtgacgcctaggaaactgtcagcctcgcaaacccataggcgcagccccaaggtcagggtcacctcgagcctccagacaactcgtcaccttgacgaccaactgaaaaaaccggaagggatggaagcagcggatcatctcgcgatatctggagcgtctgcgcctgccttcctgacctgggacttgtttccagctctcgcgagactttcaggggtcggagcgcgggggccggccgagaggaaagctggaggcgcgggtggggaacatgtctgagtcggagctcggcaggaagtgggaccggtgtctggcggatgcggtcgtgaagataggtaaggggcttttcgccccagcaggcccggccggtgcagagctgctggctccaggctgcgctgcccaggaggaaggaagggaagccccacgggaggtcaggcctctcggccttttccggcccctccggccagggcgagccgcccgggccccggcgggaggtcactcgggcggcgggcacagacccgaggagccggagcagcagcccgggtgcggggtggagttgcagcccggaggaggtggtcggggttggcaggtggcaggagagtcgcagagctcttgagtggaagacagtgtcggggcacaccctcgtgccggagccgcggggttctcctcccgggtggtgcattccccggcacgcggcggggaaccggctcaggaggccacgctgctccccggcggaaaccaaagtgccttctggagaaggtcacctggagcatttcatagaca

SEQ ID NO: 13146 - DNA, 1171 bp, Homo sapiens
gtatgtgctgggcactgaaaacacaaccgtgaacagaggctgtcacggttcctgaactcatggagctttcattccagtggaggagacataatttcagtgataatgctacgacggggcacaatgtgggagaaaataagagggaggtggccaggcgcgatggctcctcactcctgtaatcccagcactttgggaggccaaggcgggtgaatcacgaggtcaggagtttgagaccagcccggccaacatcgtgaaaccccgtctctactaaatagacaaaaattagccgggcgtggtggcgtgtgcgtgtaatcccagctactagggaggctgaggcaggagcattgcttgaacctgggaggcgaaggttgcagtgagctgagatcgggccactgcactccagcctgggtgacagagcgagactccgtctcaaaaaaaaaaaaaaaaagaaagaaaaagaaaagggggaggtaattttagaatggtcagagaaggtttttttgaaaagataacattaatcaaacgaataaatgaatgaaaagccactcgctagcggattcattatttgctatacttatttagagtttgtcagtcacgagactgttacggctctgatgctgagtatcttttgaatcctatgttgatgatgcccaaaaggcaagtgcagagatgaagcataatgaagaatccttttcaatttcttttcagtcctctgaccttgcctctgccgtcacggtcacactcccccactgacactcccattcttctgtttccggacacttgcggcctggaagcgcatgtgcaagagaaaccgtcattcctggtgaagggcgagcccccggcagaacgcatgcgcctctgtcccttaagccccgccccgacctcagcgccccctcgcgagcgcctgccgtttctcggggcgggacgggggggcggggactgggcggagaggcgcgtgctgctgcgtgcgtgcgcgcgcgccgcgggcgggccagtgaaaccggcggccctggcacgtgacctaggaccggctcaccgggtcgcttggtggctccgtctgtctgtccgtccgcccgcgggtgccatcatggcggacgcggccagtcaggtgctcctgggctccggtctcaccatcctgtcccagccgctcatgtacgtgaaagtgctcatccag

SEQ ID NO: 13147 - DNA, 1170 bp, Homo sapiens
gcccttcaaaaacaaaacatgagcgtgccaagaaagtccaaggtgttgaatgttgccacttcaagcctaaactttctaggaacacctaagtgggtggcagcttccagttctccaggctgcttctaggccagagctgggttccacaagagacagaataggcatatatatgcttaaggaactggaaaaacaggctctctctctctcacaaacacacacacacacataccaaggtagctgtcaaaatgttatccgaaattttggaaccaaaaaatcttgaaagatggtattccaatatcacattttatgtaagttttctattatattagattcaaattacgattcgaggccacaagctttaagaattcagggcctttttaacttgccaagccccacaccactccaggaacttccccacaccccagttctcagaattcatgtgcaaggtctttcctaaatccagggtccaggtcagagagtggaggatgtgctctatttcttacctgattgcagacccctctgacagtgctcccttctgaagcactcactgtctgaacgtacacagtctcagacttaatcatgcacagtgagcaagactgtggtgtgataattggcgtccctgacttattagggcaaatctatgggagggggagacctcctggaccactgagcaattaattcatttacattaggaagtttctccgtcagatgcaggaaaaaaatcttgttttcctgctgtggttttgacttttgccccatcttctgttgctgttgtaggaggcaaaataagggtcaaggcctggaaacacaagtgctttgactgaagctccacttggcttccgaagcccaagctgggttgtaccaggttccctagggtgcaggctgtgggcaactgccagggacatgtgcctgcccaccggcctctggccctcactgagttggccaatgggaaatgacaattgtgaggtggggactgcctgcccccgtgagtaccaggctgttgaggctgggccatctcctcctcacttccattctgactgcagtctgtggttctgattccataccagagggtaagagcaattctgtgaagttccaggctgggtgggggatgcatgcatagcctctggctgggatcacccaggctctcccgtccgtagtagtgtgggagtggat

SEQ ID NO: 13148 - DNA, 1169 bp, Homo sapiens
acctgggtgtctacctctccagtcgagagctctctgcaggctctctcccaacttcctgcacctcctcaccctcaccttacccgtggcgctcgggttttattcctgcccggcgcttctttcccagggcgagtagaggcttctgagtgaccggcccgccagaggcagctgcagagccggcgttccgcagggcagggcagggccgggccgctgggctggtccagtgcgcgcgggttccccctggcctcagccagccgcgggagatgccacttcgggcgacagcggcgagacgccgctgtccgcaactcctgggcgggtaggaccgtctgctgcctctgcggcccttggggcagactccccaggagtcccttcctctctcctcccgcccgggggccgggaccgcgctgtgcccacggagggaactgggcgtctctggcgcactggggctccagctgcatgatcccagctcagaccttaagcctcagtggggtgtaggtgggatgggatgtgtttttaggagatgaggagaccccggttgttgagtcgctccccaaatgcgcagtttcttaactccaggtgacatccgtcttttggaggaacgagtgaaggccgtttaggcgaaagaggggtgggtttcagtatttggatcccttcccccagctctgccaatctcaggtgtgtttacggtggaggtgacagaaggaaggcgcgtcgggggacccaggcctcgcaggtcttcggctgtcaacgaggcaccgcccactgactccgcgcttcgtccctcacagcgtggggctcggcgctgcgccaggcccgggtgcggggcggagctaggctgggactggctgggggccgccccgcccggcgcctgggcctccgcgccggcccccggggaggagttatgataatttccttctcattaaggcgctcgggtcccccggctatcgccaggacacactgttcgggcgcggctttccccgtccgcggagcggtcttgacactcgcggcggcagcatctacgctcgcagagccgccgatgcgtgtccagtgacccggacagcaaggcccgcgcgcggcgggggcggcggcagacgcctggtcaccgtgaccccgattttggatttaccgcttgggggctggggggatcctggatttaactggcgactgttttg

SEQ ID NO: 13149 - DNA, 1169 bp, Homo sapiens
cacgcccagctaacttttgtatttttagtacagatggggtttcaccatgttggtcaggctggtctcgaactcctgacctcgtgatccgccctcctcgcctcccaaagtgctgtgattacaggagtgagccaccgctcctggccagaaatctcttctttattatgtctactgtccgttatccaactccagaaggtaagaacctccactgatacataaggacttgtataccccacgtgcctgcaacagtgcttggcacctagtaggcataccaaaatatataaatgttgaacaaatgaagaaagttaaagtaaaactagaggtccaaaaatatcacaaaagccatctatggtcgccttttccctacctgattttgctgagtggccttacttttcagtcctctacacagctggaacattaatgaacacagagggggaagaagtgtgtttactctaggatcacctctcaatgggtcacttggcaagggcatctttgcttcttcgtcagctccttttgacacgggggtgaagggttttctgcaccacactttgaccacaagcatcaccaatttcactgaacccaacagaaatttggaccctctgggggctctctgcgtggcagggcccttttctttttctttgggcttaggctgcaatttgaaacaccactttcctgagccagcatcccccttgcagcgctgtcacagggaggcttaggcagccacgtggaagccacctaccccgacctttggcagaatttccaaacacaacacagtagctttaagttgattaatttggaactctgaccttggccccaaaaggtaagaatacataacaaggtattttattctcaaaatgtgtcaggataagaagcacttctgtaaatcgacctttttaaaatagatataattagatttgcagttgggggcagtaaagaaagggtctgaacagtggataacatgttgagaggttaattattaatgggcagtcttccctaacaaagtatctaataggcattgtggtctctttggcttcagaaattaccaagaaagcctggaccccgggtgaaacggagaaatggacacaagtcccctgtgtttctccattctgttggttttatgcatctttatccaatcaagtgcccttggacaaagcctgaaaccaggtaagagc

SEQ ID NO: 13150 - DNA, 1168 bp, Homo sapiens
aattttccagaactggtgggaatgggagtggcagggtgtgagatgggagaagctggagctgggaccagaatgaggccaagggggcctaggggcaacctcaggctgggtccgagagggccagggatgggagagcacaagtcacacacacacacttgcacactcgtgatatactcacaaggcacatgctcacatccacactctcacatatacatacgttcacacactcacatacttgtagtatgctcacacacccacacatgcatgttcacacatgctcactcacacacatgctgtcacacatgcacagaggcacaagctcacatacatgctcatatatccacatgcacagacactcacatgcacacacatgctcacacacactcacatgtactcacgcactcctctcctagactgcctttcactgggtatgcctggggctgggcatggtggggaggaccagaagaagggggcatttgggaaggggttggtggccaggctgaagctgggaccatgcaattaggaaaagagggtgtgggaatctccaggcccctggcagggggccaggacaaacagacaactgattagcactgaggtctgtgagtgagacctaagctgctctgttacccacccagggggctgagagccaatggggctgggctgtatccgagcagaggtgggagaggaggcagtcgaccaagaggcagggtgggatggggtggggggcaccccaggtgctgccctcctcccgtgctgcatgtaggaggctgcaggtcaccttgccctccctgccgcagcagaacaattaggaaatggatgcagttaatccctaagacaaacagggcttgagaaactgcaactcaactggagagaagagagctgtagggctaactcctcagcccgactcttatcgctccccatctctcatccggcacccagtctttccggctgggtggctgcacctccaagagggagaggaggaggaagcgaggggaccaatacactgggaggaagtgacctgaccagacctttgctctctaactccggctggacagaggcagcccagcagccccctagcatccatctggcttggggagtggtgccccagggcttatgagtgagctggaaccccatgtcctggaatcccgagtggctgtgactgctgactgat

SEQ ID NO: 13151 - DNA, 1167 bp, Homo sapiens
actcctgacctctccgaaactcttccacatgatgaggtcagcagggaccctgccggcattccatccaagctactgatcccgcccagtgccggctcagtgccagagtcctcactgtggtgacctgaacactttgtttcacgattcatagcagggaagaggagttgagtccggatgatgatgtctgcagacatttcctaactgtttcacagagaagagggttgaggagtgcagactctgcctcagctccatcctgagggtgggactatcaggtgaagggaagctctcagaggacttctcaatttcccaagactcagagaagaggatacaaagggtctgagagccctccagccctgtctgagcaattttttttccagcatgccaaggggacgacaacattgactctggtcagggttctgggtgcccgtgacgtctgcagccgcacacccaggggcccccagctcctctccacgccagcacagactcctgggaactctccctgggaagctgacggggtcctgggatgtgctcagggtcaggcctgcagaagggccctagccagtgttgggaaccggctgctggctccggcctgggctcactgtgtggcccaggctcgccatgtcaccctgccttcccctgggagagaggaggccaaggcagccagggaacgcctctttgtcttggtgcccagggctgtcagataaagccgttgagccagccgcaactggggcatccagactgcttttccagccacgccaggcctcgccccactgtcccgtttgcccaaagggggctgatgagtttagtaatgtttactgagcacccgcccgccttgtggagctgacagccagggagacgagtcggctgcagactttgccctcacaggcaagacagccacaccttgaactctgactcaaggaagagagtgggcagctcaccagagaggccagaggaggcggcaggaaggtggggtctctccagccaggggcttcctgaaagagctgccttctgagcaggccccccaggctaggaagatgtgcacctgccgagctgggcaggagagggtggcccagtggaggacccagcatgggcagaggtttggaggtggcaggtcctgagggaagcggaaggtgagtgtgcgttctggggaagataaggctgcgtgcagag

SEQ ID NO: 13152 - DNA, 1164 bp, Homo sapiens
cccctgtgtgttgtgtcttctcttctctctgctgtgaggacaattgtcattggatttggggcctatccagatataccaagatgatctcatctcaaattcttttacttcattacatctgcaaagagcctttttccaaataagatcaagttcacaggatctagggatttatatatggacctgtctttcttggggtccaacataaccccctacatggtgtagatgaagaaagaatatttgcaattgatgaatccaggtgatggatactttcatatttgttatattatgggcaatttgagtgacgcaaagaggatagcatatgcaaatagggttcccggatttgtcagataaaatgcaggatacccacctaaatgtgaatttcaggtaaacgataaataatatttcagtataatctggtttcataccgtgtttggaacatagctataactaaaaaattgttgattgtttgcctgaaattcacatttacatggatgtcctatattttatttggcaacccagtaagaaaacggtggcatcagcttgcccttcacagacatcctctcccagctatgctcacaatagggttttttcagttgccctagtctttgcatccaactcatgaaaaaaagtatctttaaaaagccagtttctgctgacttgcaaaaagagcaaaatctaggtgaaatgtattgtttaaactttgattaccaaccttgaaaaggaacatattaaccagtgtcttctgataagcagatcacttgcctcatgtcttagaatccagtaggtggccccttggccatgaaatgtgtgggagtggcttttccctaacttgacccttctttcagtgggagggaactattgagaggaacaaagagcttataaatacattaggacctggaattcggttgtccagccacaaaggtgacagcatttaacaaagtaagtactgatcttataaatctctctacattgcctcacaccctcctctctagcctcctagaaaaatacactaatatgtgtccttagcacaagaaaaagtttgtttttactcatatcatgccatcttggtgtgtttgggtgacagttcaagaactgtttatttcttttctgttggatacatctttacagaaatgtaaaaatgaagagtttagaaaaccagggcctcag

SEQ ID NO: 13153 - DNA, 1164 bp, Homo sapiens
aactgtcactacaaggcccagagggacttgctgtataacccttgaagacaaactgcttctgtctctgagtcccttatctttgtgtactctgtccacagaattgtggcactgccatttatttttcctaatgaaaattacaaacgaacttagtgtttctctctctgatattatacaaattctgctatatatgctaataaaattttcttaggagactagcagtaaagcaataaatattcatataaatatttggaatcttgcactaatgccacagatatcgaaaactttagataagatataaatagatgtttaaacttactactgattagggaaatgcaactaagtaacaattatatatcatttatcacattggcaaaaactttaataaaactttgacgtgggctgggggtggcggctcatgcctgcaatcccagcactttgggaggctgaggcgggcgaatcacctgaggtcaggagatagagaccagcccgaccaacatggagaaatcccatctctactaaaaatacaaaagattagccaggcatggtggcacacacctatagttccagctactcaggaggctgaggcaggagaatcgcttgaacatgggaggtggaggttgcagtaagccgagatcgtgccactacactccagcctgggcaatagacagagactccatcttaaacaaacaaacaaaaactttgacttgatccagtgagaaatatggagggggaaaaaaaaaaacactgctggggtaggggtataaattggaacaaagtttttagatgaatttaacaatgcttgccaaattttataatgtgcacaccttttgacgaaagtataagttgcttatggctgaggctaacatgtccctgagaataaaacagactgaaaatactaagtgttattcagtttgaaagggcaattaaaagaaaaattacaaatctacatttgctaagaattgggcaaaaaagctgaaaataggctggggaatttatgtggaggtcagagtggaagcaggtatgaaagggtccagcagaagaaaacatggctgccaaagtgttttgagtccgttggcaagtttggcctggccttagctgttgcaggagacgtggtgaactctgccctatataatgtggatgctgagcaaagagctgtcatctttg

SEQ ID NO: 13154 - DNA, 1163 bp, Homo sapiens
gaagtgatgaaagaatggggttgggaagtaggggacagggacttggggacaaggctgccttgccttttcggagaagccttctcgccatatgcaggaccaccatgtacagttgaacgaatgtttactgcacaagggcaccctatctaatgttgtattgtccataacgtaccatcatagatttgtccatttactctaacaactgtctggcatatggcggtaacaagtagtatttcatcataaccagtatgtggcaatgatattccagcagatggcaataaagagtcttgcagaaggggctcattttcctactctgcacaaaagaacatgtggactagtggaagctctgggcatatagtaagtcctccaatcttccctttccttaaagcctcacgttcctagggcagaaaagggatggggggagctgccgacaccaagtttccaagaagtggaatcctgggagccagaggaaatgtagtatttggagacctgccagatgagtctgaggatccacttgagtgagatccagggaccctgagctagcatctctggcagggccttgcctaggacgctgcagggtgggcttgaggaagatggacaagagaaagacaaaggaaagaggaacttggaggcatcacctttgggccctcccacagcagaggcctcgggagcaggtgcctcctggggcagagccctctccccagggcccggacactcacgggcgatgcagatgggtgagttgctacagaggggtggtttgcattttatgccagccttgatggccttgtagagcaggtagatcgccccggcgcctgtggccaggctgactacgcttttgcggatgtccagttgccccaggtattgggggatgctcttgcccatgtcttcagtgttgccctgggcccaggtgagagctaggcccaaggcacctgtggggggccttccggaaccagaactctggcagggtcaggaaccagggtaccagaattggaacctaggcaacaaaggaaactggggagataatgggatggagggcagtggtcaggaaatggggcagccaggagtgctcgagaacagatggggccaggcaccatggcccacacttgtaatcccagcactttgggaggccaaggcaggcagatcacttgaggtcagcagttcgagac

SEQ ID NO: 13155 - DNA, 1163 bp, Homo sapiens
aggttgactctcctgtcaactcgattcccttttggctgtttggcagggtcagtgagacatcccctgggtcgctcgaccccgtaggacggttcagggagccctccaggtcttcgtttctcctcttccccgcacagtgctgttatccagctgggggatccaacgcacacttaaggctccagcaaagtaagtgccaaaaaggggagaatgggaagaatatgctgtatttcacaaaaagcatctaagtagccatctggaaaagccagaatgaacttcaatggtgcatccaggtgggctggggatgggagaggaacgccttcccccagcctttagggccggccctgagcaagtggtcagtcggcaggcagctgcggaagggggctcccccgagtcggtggtggcccaaagtccaggccgcatccaccgcccggcgcctagcgcaggggcagcagccgggtcgccacaggaggggccccgggtgttcttgccggcttgggggaactttcccagggtcagcccggaggcgccctgcagccccggcatttggctaaacaaagcaagcgctgccggcgcggcccgcccgagggcgccgcgggaagaacctgggcaggtgcgcgccgcgggcgagcgggtacaaagttgcggcgccacctcctgcgctccgcgcccctccaggctctcctcccagccgcctccgatcctcccggccgggcctctcttcccccgttcttcgcctcctccctttctgctccttgcccttcgcctcttcgctactttcgtctttgcaggctcccgcctccccacccctccccggcgcagggccgagccggcgggggcgcgcagggggcggtgcgcggcgggcgcgggcggttccgctttcgggtttcccgccgccgtggccaatccccgcgctgcccggggcggcgacgcgcccaagccgagccgggcggctcctcccgcccccgccccccgcgcgcccgccgcccgggcggaggagaggagcgcgcggccgcgcagagcaagctgagccgagccgagccgagctgggggcgcagagcgcgggaggcggcggcggcgcggagcccaggtgagctggcggtagccgggcccggggcaagggacgcagccgccgcggccccgggcgcccgctccgtttccctctcgag

SEQ ID NO: 13156 - DNA, 1163 bp, Homo sapiens
attagaaagccccaaatagcgagattcagtgaaaaaaaaacccaaaacaaaaaagagtggctctttcaagtcatttgaaatatactgagtttgttgtaggcctttttgttttttctgtttttttaaaaaagaatacaatagaaaaatgttttctctccctgagaatatcctggctaaacaattccacgtgctggtctcagagcatgttgcttccttccttgctggggccagaggccagcagccagtaagaataggagctccacacacagggacccatatccaatttgatacattccactggggcctgggaactacagacagccccacagcaaagatttggaattgctgggggctagatattatgtcccacaagcaagaaacccagagagctctgggccagggcatgtaggtggctgtaggcccatgggcaagttctccactcatctgaatgagttaaccccacgtgcctcatggggcaggggtatgggatgagctgatgcttatgacctcacaaccggcacggagcctgcaccgtgtatgaatggtaacaacactggcaacaacacttgtgatggttcaacccaacagccattacctgtgacttttgagatgccctgtccctgtttctgcccgttcctgtctcctggccctcaggatcataaaggacagtgaggaagacagttatgagatgaagggtgggtgacattgttgaggcaggatgtgccgactaggtttggggacagtcacttcaccctccgagtggccgctgtgcaggctgggtggtcagagaagcagagggctgaggcccagaatgggtttgcatgttctgtttctgcagaaagtgaggcagcaccccatccttcccaaccccaatacctagaatgggggccagagtagggagggaatgtgtggatctgcttctgagatgggtctcaccccagcccccaaagcctggacctgagtccccaggagacaggggctacaggggaatctcaccagggaatggccccttgtgggggccccacagcaggggctgggggcaaagtctccccttctaccagacacaagcacaggcacactcctgggggccgcctggcccaggcccaggtcatgccgagcacagggtgctgctggtggccacgcctctgcttagcttctgaggt

SEQ ID NO: 13157 - DNA, 1162 bp, Homo sapiens
tgtgcctgtaatcccagctacttgggaggctgaggctggagaattggttgaacccaggaggttcaattgtgccactgcactccagcctgggcgatagagcaagactcagtctcaaaaaaaaaaaaaaaaaaaaaaaaaaaaaaaagagggtgaatggagagagagatatcattctggaatggtaaacaggggccagatcacgaatgactttgtaagccatacatggttttctgaacttgtcctagagtaagtgaagagaggttgtgtttgtttttgagatagggtcttgttttgccacccaggctgcagtgcagtggcgtgagcacagctcactacagcctcgacctcctgggctcaagccatcctccccactcagcctccggagtggctgggtctataggtgagcaccaccatgcccagttaattttttattttttgtagagatggtatctaactatgttgcccaggctcgtctcaaactcctggcctcaagtgatcctctcgccttggtctcccaaagtgctgggattacaggtgtgagccactgggccaggctgagaggttatggattttgaggagagttgagcagatttggggttttaggaggatctctacacaaaaggcttctagagtggggaatgctttggagagaagaaaaactagagacatggagatcagctggaagccactgtggtggtccaggagaggcttgtgggggctgggcctgaggttgtgctgagggggatgaagagaagtggacctgctaaaggtcacagtgctggttagtgacggaccaggggcgggagctgttgactaattacataagaatttcctgccaggaaattagcctttttttcttgtttatttaggcatgaatttaatatatgtgctacttgatagaaacagataagtaactacaagtaactgggcagggatggttagctgggaggtatggatttcatttccattactaatgcctgcaattgctgataatagacgtgccccaggaatcgctgcaagggaaatggagcaaggtgagccattctctttgaaggagttttttccagctctaccggtttatgtgtatagggtcacaccctaccttcttataactgcctcatttgttctcctttgggtcaggctgaaagtgtttgtttgcttt

SEQ ID NO: 13158 - DNA, 1162 bp, Homo sapiens
gcattgctatttattcctcgtcgggctccctttgacctttttgagaacaagaagaaaaagaacaacatcaaactctatgtccgccgtgtgttcatcatggacagctgtgatgagttgataccagagtatctcagtgagtatctccttggcctaatttagttgggtgaagtcttgggaggttttaggcattctgctaggatattctaaggtaacagttttctgcaatacatagtaggtgtaagggttcaggaggctattagagccttctgtttgaatctggggaccaggtctggtctagctgttttttactgagctttctcaccctggttgatggcagattttatccgtggtgtggttgactctgaggatctgcccctgaacatctcccgagaaatgctccagcagagcaaaatcttgaaagtcattcgcaaaaacattgttaagaagtgccttgagctcttctctgagctggcagaagacaaggagaattacaagaaattctatgaggcattctctaaaaatctcaaggtaaaaaggcaaataatgcttattccctttaccactttcttagtaataacaataaattattccattcacattgaaagtgaagttattgtagttaagctggattgtttttcctcttcccacccttcaagcttggaatccacgaagactccactaaccgccgccgcctgtctgagctgctgcgctatcatacctcccagtctggagatgagatgacatctctgtcagagtatgtttctcgcatgaaggagacacagaagtccatctattacatcactggtgcgttgactctgattgaagcctttttggaggagtggggagcacaattagggcttcctgggaactggcagtatgaggcattttagtcactgagttcatttaattaccctacaggtgagagcaaagagcaggtggccaactcagcttttgtggagcgagtgcggaaacggggcttcgaggtggtatatatgaccgagcccattgacgagtactgtgtgcagcagctcaaggaatttgatgggaagagcctggtctcagttaccaaggagggtctggagctgcctgaggatgaggaggagaagaagaagatggaagagagcaaggcaaagtttgagaacctctgcaagctcatgaaaga

SEQ ID NO: 13159 - DNA, 1162 bp, Homo sapiens
ctaaagcgactcagggcagtctcagctcaggaagacttctttttttgaccttctggcttaaagccacaaccccaggctgaggatgccacatcaacggcgtttcctcgccacgctgcaggcgtgactcacgtttctaagcctgcagggtccccgggccaagcgcggctactgagagcacagcgtcctccctcagcccctgctcatctgcacggagcaaagccgcagctttctctgctgtcagcgctttatacgactcggatgtaggctctgagcgggcacgggcccgccctcagacggcgacccgaggggcaaacaggatggaggcgcgctcccttggaggctgtggtctcgattttatctgctcctgggtggtgcgggtggtttgctctctaggcgtgagcaaaggccacaaggggcccgaaaaaatcacccaaggatgcaagcccgccattgcgctgagcaggggcctccccgccgccagagcccgcgcccctccagggaggcccgcgcgatcgagacccgccgcctcccggccaggcgcgggacaccaggcgaggggagccaggagccgggaggggcggcgccgggcccgcaaccccaccctgtcctgcctccgcctcctcccggcaggaccgtcccctcccaggccccagctccgcggccgcccactcgcagccggccagtcccgctcgggcccgcgtgccccgcagccgccacgcgccccgcagtccgtgccgaggctcccgcccgagtgcgcgcgggccggcggtggcgtgtgcgcacgtcatatgggccgccggcctcccattggttgcggccgcctcaccagaccgcgtgcggacgggctcgcgggcggggcggggcaagctcaggccacgcccctgggcggtgcgcgcgggcggtgggtaggccgggcaggctcacgtgatgcgggccccgcggcccgccatataaacccgcgcgcccgccaggcgctgcggccgtcccgggccgtgactcctcctttcccccgccccgcctccgttcggagagccggcgggcgggcgcctctcggccaggtacgcggccggctgggataggggtcgcgggcgggctttggtcgcgcagcagccggtcctccccggaggtaggcgggcgcgggccctgttgggtctttgggacg

SEQ ID NO: 13160 - DNA, 1162 bp, Homo sapiens
agaccggaccatcattattctcagctgggttgcataaaggccagtgccactgccttttcttactctacccacagagcaaatgactggttctttctttaagcaaaatacgttaagatgagttcattaacttcaatcagtgcatatagcaagttgaatacgaatttcaggcaatggcaacacacgaagatacacgaataatagggaagctcagatcaaattcaggcattgttttgccctcttgataggccaggaagttgaagtttctttttaactattctgtttacttatttattttttgagacagagtctcactctgtggccgaggctggagtgcagtggtgccatctcagcttactgcaatgtctgcctcacaggttcaagcgattttcctgcctcagcctccttagcatctgggattgcaggcgtcttccaccacgcctggataatttttgtatttttagtagagacaggatttcgccgtgttggccaggctggtctcgaactcctgacctcaagtgacccgccaaccatggcctcccaaagttctgggattacaggcatgagccaccactcctggcccgtcttttttactattctttatagtttctgagaaaagcctttggttcccgttcgttattttttaaataggtacatgaaacattttatgtctccttcttccaaaaagaaaataatgaattaagtggctctttatgtatgattattagaggggagcatcggggcctttactaaaaacaaaacaaaatgtaaaacctttcccgtctctgctgaaggggttccctgctgtgcagcagacattcagtgatcacagagcttagctcaagtttctcctaattcccagcacctctgattcccagcatctcttcttgttctgatcataaacaactccagctcttggattacgtcgggcaacataacagcaggcacggaattctctctgcttatttagaacctagtctgaagcaagcttttttttttttttggttaagtcaaaagtgaaactggagagggaaagctgagggaacaataagaggattaaagattagctatgacacatggcttggaaattaacctttaaccaaacatcttataagtaacgccagcgcagcttcccttgtgaatgtaaagagatccagggctcttg

SEQ ID NO: 13161 - DNA, 1160 bp, Homo sapiens
tgcctccaccttttaaaaatcaaactctagaaaaaacactcacctgtttggcctctccggcccctccccctccctgccctgaactgcagctgtgcgcagccagttgcctgttttccttaaaggcctcggggtgctcgtatcttcttcagacgttcagccaaaatttttaaagtgcggctggggggaagggtagcgcactctgaattcatttagctctatcgttgaagcccgggttcctagatcagggcacaaaaacaaatagaaaagacaatttctggaagattggaaaacagctaattttgcaggtgcttcggcatcagtggtggcgatgaatttaacatccatgccgggggggataaggttcaaccgcagatgaaatggttaataccttatacgaaattcacggcgaaaaatcctgaaacaggacatttaaattcactgccgaggcttgggggtggggtggggagcagggatcggaaacgacgctagtggttcttaaatgcgtttttacttgggaatgcccggcagggaaaggaaaggtcatcgtctgtttaatttccacccccagctctggacttccagcattagctcgccgggcctcagctgttgtacacacacggcgaggggggaggggagggcggaggcgcggaggaggggccggctgggaggaatctgggcgtcctgccgcgcatgcgccttgcctgagcaacaagtgggctccacagaggaagtgtaaaggggagggggaagaactggtgcagagcatggcggtgacgtcagcgctccgcccgggcggcatcccgcgcggccaagccggggacagcgcgagccgcagccggagcaggagcgccgagacgcgcctccggaacgtagagtaacaatcacaaccccacattccgggcgagcgtgagcacgagcgggaagggatgcgacccgggccgaggcgccgcgcgagcgccctgcagccaacgtgagcgccgccagccgcggcggcccgggcgccggccaggcctgggggcggcgggagcctgcgtgcgtgcactcctctcctctgctctcgtgcgtcctggaagcagtggccgcggcggctccctccggggtgcaaacccagtcgccgccagcagaacggccgacgctgcggaggggagaaggtcctttct

SEQ ID NO: 13162 - DNA, 1160 bp, Homo sapiens
aaaaacctgcaaatgatctggtcagttctataattttaaaatctaaaatcgtttactatcccaataccctaaaaacaatacttactgtggggtcttttattaagactttaaagatacttttcataagcacaattttatttcctggtgactggaaaaataggaaaatatttagagccttttgcttaattgataaggtaacactgaaacaaaggttaaaaacaaagctgaatggagaaaataatgcctatagaaatattcatgtcaaacaggtaagaatattcttggcaactgcagcccctgcctccacaattgcaaaattgcagctccctgtcccttctgtctgtctcagctccgcccacgtccagtggctgagctacaacgaactgccccacctcttttaaagcgtctttctctgaactgtgcaaggaagagagcatcgcctgacagtggtgaggtgaaaattaaaactacacaggggtcaatgctctgctgaaaagtatgaaaagaagttcgtttgtagcgtttcccgcagtctcctcgcctctcctcggcctctggcgccttcctcccctgtctgctcgcaccctatatttctaccccagctcatcagtgtatttgtttgttaattcattcattctttcattcatattctccgctgttgttaattttcccattgacagtaggcgcaaggggcaacgccactcgccctgtccctctagcgtggcctctgtttgggggtctggggtggaggtcgtcccggcccgggtggttccggacgccggctttccgcacctggctcggtgacggcctcggcgccccgccctcttggccacggtccgcagccatcgccccagtgagggcgcggtctgtgggcggggccggctccaggagccgcgctgtgattggccgtgtccaggcaaccgcggagacgccgtcgtcaacagaccgcgctcggaaccagaggcgcgggtcacagagacctagaacagctggaatccttcgcccccggcgcgcagccttcgcccgccggaatcgctgccttatccaccagcgggatgcttacctcgcccgccctctcgggtcaggcgggcccgggaggatgggagggtggctgctgagcgggagccgccacgtcttccacccgacatattgcctagtaa

SEQ ID NO: 13163 - DNA, 1160 bp, Homo sapiens
cttgatctctacaggcttctggcagcctgggtcataaaccacaaatcccctccgcttacggggaatgtttcctttcaagttgaacttttacagcctctggcttccctacccagccacctccccagggcagggggaggaaatggctttacagctcctccctcaaaatgtccaacggtggaggctggcaggaccctctcaggaccagaggaactttcctgtcaagttttaggacccaggtcacagtgggctgggaagcctggaggtacagagggaggctggtgagtcccagagcccatgcctctggaatcctcgcatcctgggactacagagtcccaggcatgtagaggctttgatggggaatcctgggagcctgtgactggagacaccagggaggtttgctgggctccccgaagcctgggccgaggctcgcagggacaagctgtcataacagcccctcggcccccctgccaccctgcccccgcaggtgggccccagtggattctgaccttgctattgtggcagggggccgctcagcctgcccctgctcctgctctgcctcatgagaccctcgtaggcttctgtgaaacccatgcaccctgcttagctcctgccgggtgttcaataaacgcccatctctgtccttctagccagaactcctttgttgtataggcctccccgagcagtggctgtgacaggtggtttcctggcacttgcctgcatacccctggggctgggtcttcactgctcccagggcagcctgctcccagctctgattttctctgagtaggtccttgtgctgcgctctctgctctctgagggccccggcgtcctccccttctctgcggtcttaggcctcggtgtcgtgtctcttgcagaagggcctgcccctgccgctgccattcccactgctggaggtggccgtacctgcagcctgtgcctgcctcctcctcctcctcctgggcctcctttcagggatcctggcagcccgaaagcgccgccagtctgagggcacctacagcccaagccagcaggaggtggctggggcccggctggagatggacagtgtcctcaaggtgccaccggaggagagactcatctaggccagcctggctgctggcaccagcacctggaggtcctgaatggtttctacctggagaccc

SEQ ID NO: 13164 - DNA, 1160 bp, Homo sapiens
gagccacctaacctggtctttttatttttttaaagagccaacatttaaataaggagatttcacatcacagtcgatttctggggcttggtttgttgttgttttttttgtttttttttttttttaattgagacaggatcttgccaggttgcagactggtcttgaactcctaggctcaaatgatcccctcctggccgggcacggtggctcacgcctgtaatcccagcactttgggaggcctaggtgggcggatcacgaggtcaggagatcgagaccttcctggctaacaaggtgaaatcctgtctctactaaaaatacaaaaaattagctggaaatggtggcaggcgcctatagttccagctactcaagaggctgaggcaagagaatggcatgaacccaggaggcagagcttgcagtgggcggagatcctgtcactgcaatccagcctgggtgacagagcaagactccgtttcaaaaaaaaaaagaaaagatcccctgccccggcccttccctcccccacccacctcggcttccgaaagtggtaggattacaggcgtcagtcaccacacccggcctgctttattatttatatcagaagatgctgcaacattggatttttatggcagcagttcgttgagtagtggctgtcctggacataggaacagggacactccctcttgcatccctgactcagcacgtttcatatgtgttacttgcctgtcccctgcagaaaagtacttgaggttacagtctccatcccaccccactgtgggtgagaaggacctttccatgcagtgaaggcacttttcccctttccttcaccccttcctgttcccttctctgccgttttccttcttctcccccagaactcctctgtgaaatacctggcctccttccctgagcctccctgtctccctgccaccccatctccactccgtgctatgacatcaccccgtaatttgaagctcctttccctatctgaagggaggcagagacagagtgcacaggctcaactaggcaaggcagacccttgcatgcctgggtcagaggtcagggtctctggcacacattcctcccagagcaactgtaggaagcaagccagtacagaggtactctaagcgctagacaggacggggtgggagtcggtaacatcgtctcctctg

SEQ ID NO: 13165 - DNA, 1159 bp, Homo sapiens
ctgtgacttcagccattgtcatcccagccccaccaccagcaccagaactcccgacactgccatcagcaccaccctcaccatcaccatcattgtaaccagcatcctagctactagctactgacctcttgaccccctgacacccctatctcctcccctgagggtttgagggtgctaggagttaggagtggagtcaaagcttcaagtacataacctagagacaagcagttctcaatgattttgcccatccagaagacacttagcagtgcctggagatatatttggttggcacaatgggtggactgctcctggcatcgagtcggtagatgccaggaatgctgttaaacattctatagtacacaggatggggcccacaacaaagaactatttgttccaaaatgtcgacagcactgaggttgcgaaaccctggctatagatcctatctatcccagcactctgcctctacctttttctggccctcgtccctaaatgcacacattatgcctctggtttgggaacaagacgtaatcttcaccactccatcttacggcaactttctctcttatcgcttgcacctcctggcctccgatgcttgaaccaaaaagtcaataagatgaaagtctgttgcggccaccctcaagaaggaaaaatacacagaaacgatacacgaagcacagggtacaccctgggttgaggtcatggctgcccagggcagggaggcagcgattagactaatcttgggcgtataaaagaggaaagagtgcccaggtcttcactccactgcgactgcagaactcagagctgctcttcctctgtggccagttggggaccagcatcatgaagtggatggtggtggtcttggtctgcctccagctcttggaggcagcagtggtcaagtgagtctgggatctggctgctggtgcagggagcctggatgggagcctaaagccctgcaaagggcaactgggccaggggacaccctgcctgtctctactctgggacttctgctaggggaagggaagtctccctttgctgatgttagacaggacacatgggtggaaggagacacagcccctgccttcaggaaacttcctatcaaagggaaaagcacgatcccttcccccatctgatgaggaaagatggacctgaaacagaggtggta

SEQ ID NO: 13166 - DNA, 1159 bp, Homo sapiens
ttaaaaatccctaccctgcgttttcctttcacagggagtgaacttctggcccaggcagtgggcagtggggcacggttgccccggagatgagactcctcttcccgccctggggggtgggggctggctggtggctgagggaactatttttgtttgtttctttttttaaaaaacggagtctggctgtgtcctccaggttggagtgcagtggcgcgatctcggcacactgcaacctccgcctctcgggttcaagtgattctcctgccttagcctcctgagtagctgggatcacaggcgcctgtcaccacgcccggttaatttttatttttattagagacggggtttcaccatgttggccaagctgctctcaaattcctgacctcaggtgatccgcccacctcggcctccaaaagtgctaggattacaggcaagagccactgcgcctggccggggaactgtttttgatgggtggggtccccggctgtggttggtagtgtgggggcgtggccgagggtgtggcctgagggagtgagctaaccgggggcgtggcctgatatggggcggggggaagagccgggctgggggcgtggcctggtggggagcggggctggggcgtggcttggctgagtgtgctgccgcggcgcgggaggagagtgtgcgttgcgctttctcccgcgatcgccctgccggtcgctagctccgagggcgcgcactggatcccaggctcctccgagagtgcggcgacctcggggctccgccggcaccggaggtggctctgagggcagggacgtgttggacacgctgactttgtaggctccgccaagaggcgccgcaggaggtaagacggcttcgggcgcgcggctctgccgggcgggcgcgggcatgggctgttaggtagaatatcgggaggatttgagtcccagtggactgcctcggggcttcgggatgtccagctcccagctgcttggcctctgcttcccccgccggtggaggctaccgggtgctcacctgttaggtccgtgcgcccgctccctgcccggcggtggctctgcgccctctgggccacccggcaccatcgcttttgggaggacatgcacgtggtgttctcgcaaaaggccgtttccagccggaagcctgcagggaggtcgccttgtaacttcac

SEQ ID NO: 13167 - DNA, 1159 bp, Homo sapiens
tagctttttctcttcccattcccacctgtgcctcagttttccaaagtgctggatttagaaagggtgaattatgagggagctggagggctttgccccacccccctccgcgcgcacacgcaagcacaggcagaggcacataccccctccaagtcaaagttgtgagtggggtggtgtttgcgcgtctgtggctgggactggatgtgtcagggatgggaaaacccatcatgctggtcacagaaaatgcgcggtggggacagaagcagttttgaaggaaaagaagaggagggggactgaaagaaagaagggggcgctgaaagggagggcgctgggaggaaaaaggtgcagtgtggaggaagcgcggcgtgggcagggcttgggaagggataacggaatatctgaggtggagtgggccgtggagcgtcggggccggtctgagcagcgggtgtgtaaatggaacagtcccgagatgaattttatgggagtctgcgcaggtccttaatgtgtggctgtaccctccagccccatgtaccccacacgatggacagacagccttggtgtggcagggcccaaagaggtcctatctaccgcaataacacgaccaggcggccctgggggcgcaggggctcggggtgggagcggcggagcgcgcggagtcgccgcggggtggcaggggtgggccgggggcggggccgcgggcgtcggggaggtggcagtgggcgcagggcggggcgagctcagcggagggcgggtttgaatgtgccccggcgggagagggaagctgcagcgagagcgcgcggatctcagcgcgggagcagtgcttctgcggcaggtgctgcccggggccggggactggggactggggactgccggggcggaagacgccgctgcccgcctgccacggagggcagggagggcgggcctgacggctccgcagcccggagaagggacgccgggtggggccccagtgcggagcgtgcggagccgcgcagcacgtggcgcgcacgggccagggagcctgaggaccctgcggggaccgggacccaagctgggcggggcggcctggctcccgggcctaaaacaggctgcggtcacgttgacctccgcaaggggcaggcgagtggacgggtgatccccatcgatctggtcggtatcagggagg

SEQ ID NO: 13168 - DNA, 1159 bp, Homo sapiens
actcctgacctcaagtgatctgcccacctcggcctcccaaagtgctgggattacaggtgtgagccaccatgcctggccaacaagattatttttttaatccatgtaaaatgtgaacacaattacacactacatattctgcttttacttatctctgaatttagtcgatgctcttttcagccacaagcatatatcttttttctcattctttattttgagaaattataaaaatgtaaaaaaattgaatataaataggcatattcttatcactcaaaattaagtgtccttatttcataagatttgctttgtaattttttttaataagaagaaaaataaaatcacagtttgccatttgttgtgaatggagtcagaggcttctgctcaccattctggatcacgctctcctctccaagattaggtcgtattaaaaacaaatttgccagctccattttctctttatttttcttctaggctaactaaaagcactccagaaacattttttattttcatttgaaattataaccagaggcctattttctgagagaccaaaaagtattcagaaatgtttccctccttgaaacctagtcacccacccacctatcatagcatttcctgccctgaaggagaattctcaccaagcacagaggagaacccatcagagcaggagacttttcactctgcaggggagcgctgtcagcatgacacgagttagcttgctgtgggcagtcgtggtctccacctgtcttggtaaggaagatgtggttctttctttataaaggcatctaatggggctgtgaagcaggagggattaacagaacagcaactgcattgcctcttagagcccagctacctggaggcagaaatatgctgcctgaggctagaatcacaaagaaaggtgtgtgggaatggggaatgggaatcagcttgtgagtctgtttctcactcacacgtgatatcccagtgaagtcctttctctcctattttccacagaatccggcatggcccagacagtcactcagtctcaaccagagatgtctgtgcaggaggcagagactgtgaccctgagttgcacatatgacaccagtgagaataattattatttgttctggtacaagcagcctcccagcaggcagatgattctcgttattcgccaagaagctta

SEQ ID NO: 13169 - DNA, 1159 bp, Homo sapiens
tctgcaaataaaaaggtgccactgcggtccggcctttgtgcacttgcccttgtgctgagcaaggcgggtggcctgttcttaccgctgggttctgctgcccccacccccatttcggtgactaaacctgcagctctgatcctgttcccaaaggggcaggaggccgggctcaccccaggcagcccctggcctccctgacggccccctcgggaggggttccgtgctttgatcgcctttccagcgccgatactgcagtagctgggcccggccgagagctcgcggtcacgaacaccggcagcctcttgcctacagtgtcccgcgctgtagaagagcctgccctggcgctgagctggtcgtggctgcttcagcagtgggcctgcgcctccttgtaggccagccctggcccagatccaggtgcctgccccggaagcgcgcggctgcccggggtgaagccggagggcggcgagcggctgtttcggccggtaggtggaggcgttgaccagcctctgggaacggggcgggacctagttgggggggctccgccccctccccaggaggcgagctcagcccgcgacctttatcccgcgcgttgcggtcaagatggcgctggtggcttctgtgcgagtcccggcgcgcgttctgctccgcgcgggtgcgaaacccggggtgggcagggatcgggccggggccggggccaggaccgggaactaacgggctcccccacgctgccttcgcaggggcccggctcccgggcgcggccctcgggcggacggagcgggcggccggcggcggagacggcgcgcggcgcttcgggagccagcgggtgctggtggagccggacgcgggcgcaggtgagcgggcggcgccgagggagggcgggcgtggggtcaggacccgcgggggtccgcgctcgcggggtgctgtcggagaaccacgtctgtcgacgctcggtttgtgtttagaacccaagtttcgaaacagaaccttgccgctctacctgggttcgttcgtcatgagataaaagtttctgtttttaaagttggcggaggccgggcgcggtggctcacgcctgtaatcctagcactttaagaggcagaggcgggcggatcacctgaggtcaggagttcgagatcagcctggccaacatgatgaaaccctatct

SEQ ID NO: 13170 - DNA, 1159 bp, Homo sapiens
gttttccatagcaacagcaccatttttacatttcctacaacagtacacaaacattctagttcctccacttcttcactagcacttgtttgttttatatagtagtcatcctcatggatgtgaggggatattttgttttagttttgatttgtattttcctaatgattagtgccactgagcaccttttcctatgattgttggccattcatatattatcgctggagaaatgtctattcaagttctttgttcattatttaattgagctatttggttttttgttactgagttgtggaaattatatattctgtttattaaccccttatcagatatatgatttgcaaattttttttttctattccatagattgcctttttactctgctgattgagtcttttgatacacacaagtttttagttttgttgtagtcccagttatctgttttttgcttttgttgcctttgcttttggtgtcacacccaagaaatattgccaaatctattctcataaagtgtttcttctgtttttttttttctagcagttttatagttttatcagattggtgcaaaagtaattttggtttttgccattaatgtcaattacttttgcaccgacttaatagctcttcgatgtttagatttttgatccattttgagctaatttttgtatatgttgtaaggtgaaggtccaccttcattcattgcatgtggatatccagttttcctagtaccatttgttgacgagactgtcctttcctcattgagtggtcttaacacccttgtcaaagatcgtttctccatagatacaagggtttacttctagtttctctattccattggtctatatgtccttctttatgctggtactatgggttttatcatttcctaatgaaactttaataaataagagaaatatatatttggaattatctgtactgtactatgtcattgactagtttatgaataacttttctcaatgttttcatttctattttattttctgtttttttagtgatcagtcctatgtgatcagttttgtggttcctaaccagaaaaggttgacacttttggcacaacagaaaggggtagaaggaacttgggttgatatctgcaataatcctgctatggaagctgaaatactgaaagaaattcgagaagctgcaaatg

SEQ ID NO: 13171 - DNA, 1158 bp, Homo sapiens
cacccaagtattttgctttccagattgtgtgcgtttccttttcacttcaccttaaagtcagcctgggtttacaacatcggcttaaggcgcaccctctaaggtttcagacagacccagggcaccgcggtgatgacctgaagctgatatctctcggcaaagccaaggtatccgggaggttctccgcgttgtgccaggatttccatccaacccgagagtctcagggcagaggccaggcccccagcgtccgactcccaggggtcccagccccctcccctggctgaccatgcgggctgggacctcccagccggaaaacaccgccctttcctgtcgcctactccttccccaggccgacgactcgcggaggaggaagagacggaggccgattaagaaaattagcattcattaacccggttcacgctccggccccggcggaggggaggggcgcgccgggcggcggcgctggcggtggccgggtgaccggcgggcgcaggtgccaccgcggcctgaattttactctctcgggccggcagctgcgccacttgcgcctcgtcgcgcgtctggggcagccgccaccggcttgccccagctttaggcaaatccttttgaaagaccctgagggagaagaaacgcctccctctgggtaggagaacctgtagcgtctgctgttcgtcgcgtgtccagttgctcagccgggagctccggcatcttcagggcgcttattccactctccgggttttggctgcagctctgaggggagcgagctagaaactgacagaacgcgaccctccccctccgcgcccaccggagcccgggctgagagggacctggggagctgcggcctggccggggcggcgcactcaggtggcctcgcttccctgcgggtcaccgcccgccactcgcacagctaggtcggcctgttgggatcgggagaggtgggcgcacgagttttagtgcgggagtccggggtgcgggcggagtcctattgtccccgtgcacccgggcggcagcacctccgggtccctctttaaaccgagcgtccggcgacctttctttgtgcttagggagtcgaaagcggcatcttctccgagagaagtcgcctactggggggtggcgctggggaggtaacaatgggcgcccattgtcctccgagggtccaac

SEQ ID NO: 13172 - DNA, 1157 bp, Homo sapiens
ttgcagttttgttttgatgtgctgattaaagtagcgcagagggcatgatcagcagggctccagtaagacgctcccacgggaggagcaagaacacagaacagagggggcaagacagctccaccaggagtcaggagtgaatcccctctgggaacgaggcactaggaagaagaacttccagcccaggaggtaggtagcgttcagaagaagcctggggcgggcgcggtggcgcacgcctgtaatcccagcactttgggaggccgaggcgggcgaatcacgaggtcaggagatcaagaccatcctggctaacacggtgaaaccccatctctactaaaaatacaaaaaattagccgggcgttgtggtgggcacctatagtcccagctacttgggaggctgaggcaggagaatggcatgaacccgggggacggagcttgcaatgagccgagattatgccactgcactccagcctgggcgacagagcaagactctgtcccaaaaaaaaaaaaaaaaaaagcctgggactcttagcgcctcagagccttactcagaatcataaaatcattagaagcaatgtctgtcctcactgctgcatccgatattcttccggaccactggatcacaaatcaaaccatgtgactcccgcatgagcaggcagagtggagataacacggatcgctgtgtacactgtgtgctccggttgttgcatccgagggttgatcggatggtggttcccatccagatccaagtcctggcccctgatcacagagaaacacagctggacattaaagtggtgaggacggaaattataatatttggtgaccagtgacaggaggggagagagccgagctccgctccgagttgtgcaaagaagtggggagtggggaggaagaacagtggggactcagtggagtgaggaaagtggaaaattaccaaaagcaggaagggagggttagccttgggaaaccaatctgggtttgccacgggggcttactgaagtcaggcccccagtcccacagaggctgggagacaggggccccatcttcaggtgttggccagaacacaggaaattctcttggtagccatgactttctcaggcaggcgctttgaagggggctgggatcattttaggaatgtggccttgagctgttagaagccatgt

SEQ ID NO: 13173 - DNA, 1156 bp, Homo sapiens
aaaatacttttgggtgctcgcttcggcagcacatatagttggaatgatagagaagatttgcatggcccctgcgcaagatgacatacaaattcgtgaagtgttccatatttaaaaaaacaaaaaatacttttgggcctggcactgtggctcatgcctgtaatccaaacactttgggaggctgaggcgggcggattgcttgaacccaggagttggagaccagcctggacaacatggtgaaatcccgtctctataaaaaaatacaaaaattaaccaggtgtggtggtgcacgcctgtaatccaaggtacttgggaggctgaggcgggaggatcgcttgagccaggaggttgggcctgggtaacagagaccgtctcaaaaaaatttaaaaattaaaaaaaaaactttctgcaagatgaagtgacaatacctggaaaatacatgtgacttgaccaaaaattactataggtgaaaataaatttagcaaagttgctttcctaaatacaacccaaaatagactgggaacagctacatactgttaatggttccctctatgtgacattctagaaaaggcagaactatagggagggaaaacatctgtggttgcccaggagctaggggtgggaagagggaatttactacaaagaggcacgaagaaacttgtgggccagagctattttggtctccgttttggtgatgtatatacgtttgccagagttcacagaactgcacactgaagaaagatggatttcacggaatgtgaattatatctcaacaaacttgacttcaaaaaacagatcgagaaaagatgattctattcccaaaaagggggaggggggaagatcattatataggtgagtgttcatttaaatcagagtacgagatttatccgtgaaaatcgcagtggagcgaacaagggggatgctgataccgacctcctggttggaaagcctgtagagcagcgcggatgacagtggaacagcgggtcaggcggtgggcgcctgagcgaggggctagagcgggatgggcgggcggagcaagcctgccagcctgggcggggcctcggcacaggagctggctgcgggagcccgccgtcctgagtcgcaggccgaggagacagtgagtgcgcgccctgagtcgcaggccgaggagacagtgagt

SEQ ID NO: 13174 - DNA, 1155 bp, Homo sapiens
gacctccacatggaactgtcacagcatccctcccaccaggctgtactggccaaagcaatccagccagccagggtcctcctctggacagagcagcacaccatcatgtgcaggcggtgcaggcgtgggaaggaagagttggtggccgtctttgggaccccctgccacagttaggagctttctcagtttacaattttactactcactgacctctgcctctcagtgccctgtactgggtgtctttaatattctattcaaatgaacttaggccaacgagctccccactgggggcactgggtgttagtcttgctcttcccttagccagctgcatgctctttagtaagtccttttatttatttgggctcagtttcctcattttttccacctggagtttgacagttggtgggaatggacagcactagataagtttcaaattaagtagactagtcgggtgccgtggcacacgcttgtagttccagatactcaggaggccgagtcaggaggatcgcttgagctcaggagttccaggctgtagtgagctgtgatgggaaccattgcactccagcctgggctacaggccctatctctaaaaaagtatcataaataaataaaggagaaaatgcaggtcaagcgctagcactgtgcagggcatgtgttatgctagtagatgtcactgattctccagctctaggtacactcctgtcttctctggcagacagcagcattccccagcaggggctggtggctagcccacgcagaggctcctccaatggcaggctcctcccctctgcaagccctacagctcaagggaaagaaactttcccatcacagagaactcaataaaccagttttccaaaatctctcttccctgtgtttacccgtttgttatgaatttacttcttgggtgtcagaatatttaagaactcggtggagaccagttttatacgtttccttctgtccttcctggctccacagctgcaaaaacatcatccccactactgagcttactatggggccacgcaagggtagacgcttgacagacattgtccaatgtattccttactgcagctgcccacccccgccgtccccgccccccagggagacattacttccgtcttccccaaaaggaaaacgaggcaccgagaagttaaggaactt

SEQ ID NO: 13175 - DNA, 1154 bp, Homo sapiens
tttgatatggtgaaggcaggactgagggctcatcacccctacccctcctcctagcagaacaagttgacctttaccagaacacaccaggtcatgagtcagaattcccatgccatgtttgctgaagctattaactcttctaagtcctggcaccccaggacatcttgaccgtcccaacgaagcactgccaccaaaaccagtttgggtggagccttggcttttcttactccatgtcaaattaggaaggtgacccctggcaccagggtcccatcattccccacagtacttttccaagacccaggggggatatgagagaggagagacttgcagcctcctccacaaggaagggggctcctaggagatgagatgggagtaacttgtgccttggctgtggtgagcagtaggggtactcctggtgtaggtacaaactgtgggaggtttgggcatagccatatccaccttgcaggtggatgtgtcagatgggccatggtgtgtgtgtgtggggggggcgtggggggtgacagttcctgcaaggtagggtccgaggaaaggaaagacctatggaaaaggatacacctgggatcttgaggagccagctgcacctgtttctgggctgagaggcttccggagccaccacaaggtggagaccaaggatggcgggggtggggtctttgcagaccggttgttaagtcctggggctggctgtgcatcctgaagcccgtttggcacagcctgcaggagggactttgcaaagccgcgtccaggtagtatatgaaaggtgtgttgagctcaaatggtcagcccggggtcatggggtcctggggtggcggggagccgagaagagggagatccacgaaggaggctttcaccccttggcagcgggcggctgccttgaggggcgggctgtgcctggcgcgactctggcgccgccgcctgggggcatccggctgtgagccccgtggatggggcgcctggagaccgcgtctctcgaggcactaggtcctggtacttgctgggggtggggagggagaggggcgcacagcgccgagaggcggacgccaagcgcgtgagtcactctgctcccctgggttaggagcgggactttgcctcccgcctggggtctgcatttcagctccagcttcagtgactcatcccag

SEQ ID NO: 13176 - DNA, 1153 bp, Homo sapiens
cagtctggctctgctcttctttcctccatccttagcccacagcacagaaactggcacattgcaggtgctttttgctatgtcagttcctcacctgcttaaagaggtcagggaggacagtcttcctgggcgactcctggcctcaggaactcagatgtgtgagcctcgcccataagaaacaaggtggaggaccctgtagggcaggaaaatcatgttaacagctttggcgtggggcactccccaggataggcacaggagctgtgcaggcaagtagaaaagagcactgggagaacggcccagttcacagaagaggaggcagcaagtctgcacactttgtactatgctgaaattgttcaatcactcgacagttcagaaataaatataggaagattttgaaaatcctacctctctgctctgctccacagcactcctggaagcctgcactttccgtagaccttaaaatctcagaggtagggctgccaccaaggtgaagatgggaacgcagatgatccatgagtttgccctggtttcactggcccaagtggtttgtgctaaccacgtctgtcttcacagctctgtgttgccatgtgtgctgaacaaaaaataaaaattattattgattttatatttcaaaaactccattctttcctaaatattttcaacaaaggatttctttatgcattctgcctaaatacctatgcaactgagcccttccttctcagctcaagattcgtctggtctttccctacagctttgtgtgtgccatggccacatctcctgggtacagttcaaggagacatcttttctaaaagggtctgcgtgatcattaaaatataatcaaatgtatactggtgtgtgtgtgcacgtgcgcgtgcgtgtgtcatgctaaggaaggggcaagaaggaggatgcagagtgagttacagagatcaagtactcaagtgagtacagaaagactacagaagacttacctttatttggtattttaaatgaattccatcaggctgaggtcctgattctaactagctgaaaaaagtgaaacactgacatcttttttgctgaaaagcattccctgagcttgatgccacagcagttactgccctgtctcctgcccttctcagcccagcttcctgtaaggtggaggctgacttttctg

SEQ ID NO: 13177 - DNA, 1153 bp, Homo sapiens
cgctggctaaataaatgcactcttaattcgtctcaaagagtggcgttttctctaactcgctcaggtacaacactgtctctgtaaatttcataagaagtgtgtgtgtcttagtttggatctccccaaacagaccttgagacgaggctttgggtgcaggtaattgaaaatggagctgatctcggagtgcacgagtgaggaagtggaaagtgtgagacaaagaaaaacaagtaaagggtgggtgattgagctggttgctgctctggtcaatgagggcccacttccactaggggctctctgagaaactctgcagaaccacggttctcaaacttcagcaagctcttgggcatgccgggtcttactatgttgcccaggctggtctcaaactcctggcctcaagcgatcctcctgcctcggcctccgaaagcgctgggattacaggcatgagccaccacctagagcctgctgattaatttgaaaatgcccggccccagactgggggtcctgatccagtagccttggagtgggccccaagaagggccgcggtgtgaactgcatctcagaactacggcgctccgagagggcagcgactcgccagagtcggtcagccaggccttgcctaaaagcagagaaggcaagagtgcccgggagcgcctggcgaagcttcgtggcttccagcccgcccgggtggcagcggcgtccgcgtttccagggcaacgagggtggcgcggttcgatgacgtcagggcgcccgcggctccgccccgcccatgggacggacggaggccgagaggcgtggcgggggagcagtggggccaggccagagacagctgcgctgtgcgggcagctagtcccagtactccgagtcggtcgcgggccgacaggcatcccctgagcgcctgctgggtgagttggacggtgcagagcagcgaggaccggggagcccgaaggtggaggctgcgttagcgccaggggcgcggacgcgacggggcgggagcgggggcactgaaagtgccaggcccgggggtgtgggggctgtgaggattcgcgggcgggggggccagggttacccagagcaggggccaggagggccggtggcccacgtgctgggcattcggaggactttacacattgaactaggcagctgttcacgaaag

SEQ ID NO: 13178 - DNA, 1152 bp, Homo sapiens
tcataactgccactctgaaagcatatagtgtgtgtgtgtgtgtgtgtgtgtgtagataaaaataaacggatgaaaacaaaataccacgaaaacaataatcacaggaaagtaagaatggctatattattaatatgaaacaaagtagactttagaacacaaaagttactagagataaagattaacattacataatgataaaagggtcaattcaccaagaagacataacaattccaaatgttgcaaaatacatcaggcaaaacatgatagttttaaagggagaaatttgaaagtccctaagttttgttaaaatcttcaacattcctctcttagtaatcaacagaactaggagacagaaaattaggaaaaatatagaaaaaactgaacaatatcatcaaccaactaaatgtaatagatattatataatattccactcaacaccaaaaaactatacaacttttcaagtgcctatggaatatctgccaagatagatcatatcctgggtcatcaaataagccttaacaaatttgacatacaaaatattttttctgagtataattgaacttctgatttaaaattaaatcaataaccaaaagataagaaaatcttcagacacttggaaattaagcacatttctgattaatccgtgggtcaaataaattggaaaatagtctgaactgagtgaaaatgaagctgggaagcagaggaatgaaaattttgattatctaggtaaagctgtcaattaagcagactagagctctgggtagagagaagagcttttctctgattaagctgtttactttctcatggcttaaagacagcactttaaattttggtattagccacaataatcttggacgtaaaagagaaattgctccctataatatgatatagccaggcaacccagtataaatgccactgctctgcaggaactggccgaatatcaatgagaagacaaacagtccaagcatgatgacgtgaatgtgatgtttggcagggccaacagaattgagatcataacctccactctgaaagcagtcttcacagaaacttttcacagaagtcaaatagttaaagcaaattctagatacatggtagagaccaggagaaaatatgaataactttcttctaaacaaggagctcagtggataaacc

SEQ ID NO: 13179 - DNA, 1151 bp, Homo sapiens
gagtggtgtgtgtgtgtgtgtgtgtgtgtgtgtgtgtgtgtgtgtgtgtgtgtatcctggggcctggaaagcccagtctaagggatggacgagggggcaggaaacagaggagaaccaggccagaccgttcttcccctggggcctctctatacccgaacctggaacctgctgtcagtgttgaggcctgggcggctctcttttgtcatactgattctggctcaaggtgtaacctccgccttctctatctggcaattccctcctcccctaccccgctccgcgcgcgccaacacacatattgctgtggacacaacccttgcgcccaggcgtgaggcttagggagtagtggctcctttgtctgctcccctaaagcggacctcctacccgcctgggccggcccattctttagctcctcgcgccgctccccgcattctccagggcaggacgtcccaagtttttggctgcaactgagtgctctcctgctagtttctgcatctctctccttgctttagggagagatcagagtggggaaaacagctttctttttccaccaagagtggagattctttttggagtttcccatcctccccttcgctgccataagcctgggtcaaatgggcttcttccgcctatttggcgtccctcatcgtttcactcccagaaacttggggcctaaacgtagagagtctagcagaaggggatgcctagactgaatgtggcagtgccccggggccgaggggagaggatctttgcttggcctttttatctattctcttaagggactgcctgcggaggaggagttgggtgttgcgagactttaggtgtgcatccggctgctccccgcgccctccgaacgtcctctgaacaattttgctactgaggtttcctctccctcatccctcatcacgcctggcccgcaccgtggttggtaaagaaggatcaagaacacctttaatccgacgcgaaggctttgagggatacatagaaagggagccacgtcgttgagctgctctggattgaagaggaggacgcgggaacgccctcctccacctcactcctctggtgcgctgagcccctcaaacgcccccagtcctcctccccgtggcacgcgaggaagattctcagtgtccttacagagtcatcttccctgagcc

SEQ ID NO: 13180 - DNA, 1151 bp, Homo sapiens
ttttaggagagacggggtttcaccgtgttagccaggatggtctcgatctcctgacctcgtgatccgcctgcctcggcctcccaaagtgctgggattacaggcgtgagccaccgcgcccggccgagaatatattatatttttcttgttattcattcaacaaataggaacacagtacctactctgttgccacatctatgccagccctgtttcaggggtgttgggggagatgaaatcaataaaatatgatgtctactttcagggatggatttcatgccccaggcagcagagtaggaagaatgactatagtctcagtagctgctggttggagcctgccatcacttcagatggggttgttccccagaagaggcaacccgcataccttcccaggtccatcctgggctgccacctgagttgcctgtcttccttctgccacctccacccctatcccaggcctgccactgctcatagcagatttcctatcaaaggctctcctggcctcctctcttatctgtggcccccgcagggcacccactttcagaaactccctggaaggcccagcacctgcctctctccacccctggatttctaccagcttggctgaggcctggggctagtggggagagcttcttggcctcttcccagaggcaagggaggaggagggaggctgggaaagccgctggggctcagtgtcgcaattccgggccgtgctgggacctttgctccacgaggtgcctatggaggggagggaacacgattctggaggctgctgggattggggtgggggttcctgggaggcagtccttttgcaagagctgctaagagcgctgggtaaggagaggaaggggagagacatggaacttggctggtctgcagggaaatgccactgttttggccgggagtagggggcgggagtggcgggagagggggtggccggctggggaggagccagcctggtggagaagctgccctgtgggcgggggtgaggaggggagggctgtggtcaccaggcaggaaggaggggtggcctgacccctcggcagtccctcccctcagcctttccccaaattgctacttctctggggctccaggtcctgcttgtgctcagctccagctcactggctggccaccgagacttctggacaggaaactgc

SEQ ID NO: 13181 - DNA, 1150 bp, Homo sapiens
tagaaagtgcgtgcagatcagagccatgaagtgaagagcaaagcaagtgacaggcctgtctcaggttgtgcaacagaacgtgtttatgacagatgtcccctgtccaagtgagtgcactgtgagataaggggccggtgacctaccaatgcgtgtggcaagccagcctgttcccccttgcagggggaggacactcctgccctttattccagggaagagtatgtgtaaaaatattcacccttgttggtatcaaatgcgctgaagaaaataggtatcggggtttcagccattcggtctccttgttagtgtttctaagccctgattttcagtttcaaaaccttggtctctgaatccgcagtgatgggtctctagagcgaatacatggcagggccgccttcctccgtacagaaagggagaattgtgcttgtgtgttttaccaagcaggacagatggggccgtcacccccgtgacccgagccctgcaaaactgtgttctcacacgaaaacccccaggctctgcgggcagcgtggtcctgcagtggctaacactgggcgaccggagtcgtgttccgacccctaggagaggaaccggctcggtcgtggtgcagcccgcgaggagacgacctcagggcgtaatccgacgccgtgggttaagacatcagacctcaggcgcagtgcagccggcccctggggagtcaaggaccttgatcgccgataacaagttgccgttggcgggcgccgagggtgacccgcgagcgcggcacccgcctccccgcccctagcaggaccccctccgccccgcccccagccggacccctccccgaggccccgccccacccgcgagccgcagccgcggccccacagcttctggggctggggccccggcagccgggcaggccggcctgacctcgacctccgccgtgcgggcccgaccggtgagtccagcccggcagtcgcaggacccggccgccagcctctccctccacctctccctgcccccagcgccaggcgcgggctgcgctcggtggcggcggcggggccctcaggcggccatggcggcaggcgccggggccgggtccgcgccgcgctggctgagggcgctgagcgagccgctgagcgcggcgcagctgcggcgactggaggagcaccgctac

SEQ ID NO: 13182 - DNA, 1149 bp, Homo sapiens
tcttccttctcaagaagcccattcccctggcaggccttctcacttcctgaaattgttttcatctcatcttcatctgcatgtggatatgagctcaggaaggccagagcccttctctccatcgctcatagctgcaccctcgggtctagaacaaggtcttgtttatagtaagacctcaataacagttagttgcagaaatattagctaacatctatttagtgcttgttacatgtgcacctgcgtctgctttaaatggtgtgcacagatgtactatttaatcctgaaaactagccccattttacaaggctaacagaggcacagaggaattaggctgtgaattcaagcagtctggcttcagccatcacggtcctaaccgctctgcaaactgcctctaaacgaatgaatgaatgactcaatcattctaactggcccaagtcaaaatattaactctgccactcagccaagttgacctggggccaaccgatttatctccctggacttcagattgtttatccttaaaggtcaagtccttcctctcagttcgtgaagatgtaagatgctggagaaaattgactcaaagacaccccatacacgcacgcacacaggaacccacatccgaacaatgagcgaggtaggagctggggagagtggcgcggggtcaccgccagatgcggggtgtggcaacctccaggcggccaaagtctctgacttccaggttcttctgtttgcttactccctatccgggggcccaaggcgctgtctccgccgcccaagccccgcgtaaacctgggtgacctcggagacatccgttggagcatgagttcccgacatcaggcggcggcggtggtccgggagaaacccggcggcggggagataagcctgcccaggaggcagggggctgggctagctgccccgccccgcgcctgacttcgttggggagggagacgcccggctcccgcccctaactagcccagccgcgcggagcgcctgggagaggagaaggagccgacctgccgagatggaggcgaccggcacctgggcgctgctgctggcgctggcgctgctcctgctgctgacgctggcgctgtccgggaccagggcccgaggccacctgccccccgggcccacgccgctaccactgctgggaaacct

SEQ ID NO: 13183 - DNA, 1148 bp, Homo sapiens
aggctaactccccagctgactacctccagccccgctgtgggctgcctgtggaggaaggtgccgagtggggcgcttgtagcttgtgctggaatggtagcggctccatgcagacaggcattctggggtggggtgggggcaaagttgtggggaggttcttaaccaagtgtggaggctgacagaacccgccctggggatggagtagcgttttcaaaataaaaggcccagtttggtataagactgtcaaggcatcaagcaggcctgaggttaattccagcactgatctaacgtgctatctgccagtccctcccctctcctgcctcagtttccctacgtagaattggttcagatgacctctagggccctcccagctctgtcacattgtgccccgtaaattccatggttcctttctcctcatcaccctgctgtccagagaaccttgctcgcagcccagttgtctcctgtcttttctggtaaggacctctggccactaaagtcctgggatgggtgccaacctcagtaccctccttgtacctccaccactggatggggcaaggggtagagcagagcacactgcccggcacaaggtgattggcagctggtcaggacatagtgttctgggcaactcccagccctcccctgccacattctggtccatgatgtttctttccgtactggggtggagggtaaggagcagcaggaggcgtctacctcccaagtagtgtggaaatttctccactgccaaatcccattcactagaggcacacccaggagtgtgtgggagctaaacccaagctaccatttttttcttgaactctatagagactggagactcccaaggttggggacagagaggagcatgagtgactgggctaaagcactgggggcttggggtggttgtgctcggcattcaaatgagcacctcctgctggagctacagagcccaggagagagaccagagagatcctgccccacccacccacccacgcactgtcctctccccatgctagcgcttcacggatggcatcaccaacaagctggtggcctgctatgtggaggaggacatgcaggactgcgtgctggtccgggtgtatggggagcggacggagctgctggtggaccgggagaatgaggtcagaaacttccagctg

SEQ ID NO: 13184 - DNA, 1145 bp, Homo sapiens
ttccttatcagttgggggtttttttgccatgataccatcgtggaaatgaaagacaacgtgaaaatcctgcgtccttgtgatatttcatcagtgggagtgagcggggatcttaacgcagtaagaggcaagataaacggatgagaggcattagttcaggcttacaggagcaagatgcttttagtcaaagtgttcaagatagctctcttaaagaggagcagtgaaacccaaaaatgagtgtcttttgagggcagctggaagatgacccgaggggaacttttatcctggggtggagtcctgcgaagcaagccgcaggtgagggcgtgggccaattctgcgcctcactgctgttaggcgcaaggacatcccgaaacacactcaacgacaccagcagcgagactgacagaagcggatcgccagcgggagcaacaacttgaggcgagccgttagccgcctcgccttcctcgcagcgcccctcccgcgccccgggaagcccgttcggctccgccttttcgactgacgtcccgggcgagcgggggcgggcgcgtgggtgggccgagccgtctgcagccagcgattcggctggctctgccacaccaccgcgcgcccccgctccgcccgcccctccgggcgcgtcttttccgggctcgcgctgagtcccgcctccgccggctgtccgggtgcgcgcgcgccgctgcggctttttctctggcctccgccgcgcgctcctcctcgtcccagcgctagcgggcacgcggttcctttttgcgagctttccgagtgccaggcgccggccggctgcgaagacgcggtgggccgcccctccggtgagtatccctggatggggaggttgcggccccggcacccctgccctgtcggtaccagggccccatttccagagggggactggcgtacctcacctgagccgggaggaggttgggtgggcattccagctcctggagtcggctcgcttttttccttgagccagggctatctatccgctcgcctccgctggggccgggaagattcccgaggtcactgtatctgctcctgtgatggactctggggtcctcggaaccccagcctgcctcttcctgccgctcaccgcatcccgagggccagaagtcatcttcctgatcggggtacta

SEQ ID NO: 13185 - DNA, 1145 bp, Homo sapiens
ctgatcagaggatccagggatgtgggcagttctagccccacctgctgcccctctgggccgtaagtccactcccccacccacttcccacggttcaggccacatggacccttttctggtcctcaagtggccaagttggttcccacctcagagcctttgaacttgcaggccttagcgtaggatgttcctccctccccgtggctcacgccttctcacctttcacttacacaattttatttattttactgcatccagtacctgaatggccttatgcacttacttgctgatgttctgtccccttcacgccatgaaggctgggagttttctgtcttttcacacacagctgtgttcccagcacctggcagtcactgaggacatatcgctgcctcccctctccaatgccccgaatccctgatcttgcaccaattttctccgtaaaatgtattcccttccaatatatctcatttgcttatatgtgttgtctgacaccctcactagaatgtcagctccagaagggcaaggatcttgttttgttaattgtttaatttcaaatgcttaaaagggcatatggcacgccgtaggcactggataaatatctgttgggtgaacgaatgaaagaataagtgaatgaatgaggaccataacccaccctcctggactggctggctgtccctccagggaaaaaggccagttaaaaagctggcctccttcaggtgaaaccatttccgtcccctcaggatgggcccgtggctccaggtggaggccagcacgcagtgtggagggcctggttggccagatgtgggaggagtttgccacaggtgagcaggtggccagctgtggccccgcccccaggaggcccgtccccacccggaggcttcgccagccccctcctcgggggccccgccccgtccaggaaagcccgcccactcctcctgaggccccgcccctcccgggaggctccgccggtccctgccccaggatccccgccccctccgtcactgaggccccgccccgtccatcagcctgtctcaacgcacgccagtctcagctccgaccttgcagcggcgcagcgcgggtgggaggcggggaggagcagcgggaagagcggagcgaggaccgcgtccggcgcagtcttcaatgagcagcgc

SEQ ID NO: 13186 - DNA, 1141 bp, Homo sapiens
attgctggggcttagcattaactctcagtatcctgacataaatgactaactagagccatttatatttgtccaatatatctggtcaccttgaacagtgcccacctctcccttggcatattttcaggtgtatggtgccagtggactggtatccttgccacctgttagtaacaaggctcccaatggaagaataaacatggtctggaactaaactggaaagaatagagctgataatgatgattacgatgatgtggtgagtggcagcgttggggagaattaagaagggagaagataaagggaagaagaggagagagccacacagaccaaagtctgtgtgggtacaacagttctattttaagattactgtgggaaaacaaagggtatgatcctgtctggattgttctgaccctcccctgtttctctccccaccccacttgaagctctgggatagccttcaaggatagggttggagattccaaccctacctcttactctactcttgtggctcttggtggggaggaaaaacgtctccctgccaatcggagactcccagaatagcacagcaatttgatctggggatctgggagaattgttaaggatcatgagtgacctcccctcttccctgtgcccaagctccttgaataccaggaatcaaaagctaaaactcaactaacggagtttgaccagcattcaacacagtctgggggagagtgaaacgggaagctgaaaggcaaccaggaccccctggatgcaaactgccaacctagaattgccaaagtacacttctctatttcaatgttcttccctcccctcttcctcttcttttaaaacatccatagagctgcccagaatgagtggaaagtttcagggtcagggagaacctcttccctcccccactttccattgtctaaaatcagcctcagctgttgctagatattttttttgctggtgatgtcagttcatcaaagcgtctcaccctgtgttcccccaggagaacaatgatggggtggagggagctggaaagaccatattaggaacaaaaggtggagctatgagcacagataaagactcaagtctggggacctcctggtcactcaggcagcagccccttctttcttgccccagtctccagttctccagtgtt

SEQ ID NO: 13187 - DNA, 1141 bp, Homo sapiens
cccacacacaaaacctacaaacaccaattttctagttataagagcttgttttaaggattttaattctattccaattaagtcctaaagctaatgcaattatcaaaatctcgaagagattttattcaaacttcacaaaaggtctctaaagttgtccagaaaccttggtgaaacagattaggaaatttggaaaggaaataatgcggagacccgtagtaccaaatcatgagacctctaatacaattttaaatattaatgtaataaaatttaaattttggtgtaataaaatcataaatttcaatattggtcccaagtatagagaaaaagtacatttatgttgaatgtggaaaacattatttttaaaatacagccgattaaaaaattgctggggaactgattataactattgataattcctaagaaacatagacaccaaaacatcacttttatctctttaatagaaattggttaaattataatcaatataaggaggttacaaaactccatatacaacactgtatacattttcttggaaaaatatgtgcaactgctctgcaaaatacatgattaactagcctgtgtgatgggataacattgtagtttcttaatttcttgtcctttcttgtatttcccacagtattgatgtatatcttctgcgttcaaaagcaattttttaaagcctcataacgtggtaacaaaatactatgcacgttacaaaattcagaacacggaaacaagaagctcgctttttttttccccctatttcggtttggccctttagatttcccctcccccaccggggcgggacttcccgccgacttctttcaggttctcagttcggtccgccaactgtcgtataaaggcgctgcctcaggccagagtcctcacaaagcgttgggtgagactcctcttgctcgtcatgtctggccgcggcaaaggcgggaagggtcttggcaaaggcggcgctaagcgccaccgtaaagtactgcgcgacaatatccagggcatcaccaagccggccatccggcgccttgctcgccgcggcggcgtgaagcgcatctccggcctcatctacgaggagactcgcggggtgctgaaggtgttcctggagaacgtgatccgggacgccgtgacctatacagag

SEQ ID NO: 13188 - DNA, 1141 bp, Homo sapiens
cctctgtcctcaaggttaggctccagctggggaggagtgattcactcttgtaaattacagggaggctccagggaggcagatgctcccagcctgatgactggcagcaattctggggcccttacctaggttctccctgccactgcgggctccgggagctctccatggtgacctaggaactcccctgggtgcttatgctccgccgagagttgctctgttgcacattcattcaacaaacatttgtttagtgcctgtcacatgggctcagagtcagctttttgggttctgatcccagtcagggccacttcctgtggccttgggccatggcttaacgctgagcctcagcctcagaagtgccggccttgtagaggatcgatgccatcgggccagtgctcggctagggctgaggaagcgttggccgctgctggctgtagcatggggagcccagagggctggaggggccccaggcttggtgggcccagggtgcagattgacaggaaagggacagtggtgtgccctgagcagatagaagggatggtggctgcaggatgggttggggaacatgggaggctgggagctgaggctactgggtgctcatgatctctcctctctcctcagtacggcaagaagaagctgaaatacctgccctacaatcaccagcacgaatacttcttcctgagtgagtgctcggcgccccgaaatcactctgggaccctcccctccccccagagtggcgtgtctctccctcctacctgacatctttttcagatccagaaagtgacactaaacttgttagaagcgggggccacagcagccttgctgtgcagacccctcagcctgtgttacaggcctgatggggacacagaggctcagagagtcccaggggtgacacacgtcctcaagggctcccagccttctctgcaggccccggggtccctggctgcttctgcccacgtctgcagggctggcccctgcactcagtgctgggcctgggttcccctgaccttccggcacaggcagggtggaatggatgcctctaagcgcctgtctctctcctgcagttgggccgccgctgctcatccccatgtatttccagtaccagatcatcatgaccatgatcgtccataagaactgggtggtgagt

SEQ ID NO: 13189 - DNA, 1140 bp, Homo sapiens
ttttagtaaagacggggtttcaccgtgttagccagggtggtctcgataccctgaccccgtgatctgcccacctcggcctcccaaaatgctgggattacaggcgtgagccaccacacccggcctaaatgcaattaattttttttgtgtatttgttgtgtaccctgcaaccttgttcagtttgttagttctatatttgttttgttttggtagatgacatccctcaggccctgctactctggactttcatgatggagatggtaataggaattgtattaagaaggaatgtagggatttacagtgagctgtgtttaatttacggtgtttaggccgcacccgaaacacattagaacagtctttggaggagggaggcggggtgggtggggcatcctgtatttttagagttggagattctaaaagttcagttgtgaactcttgatttcggtgccaagcggcactcaagccgaaaggccaccgacactcgcctgcggggatcagggcgggatgacctgggtaccgcggtcacgccaaggccgaggccctcacccttcccctctttgggaaagggcagacaagttccgggttcccttctaggtccgggcgagggggagagcgccccacagacgacaggcgcctcctgcctctctccttcaataaacagtccacagtgtcccggctgggctcgccgtggcctccgccttcccggcggacacacctgtttacccttcaccgccggacggccaggaggcgccacgacgaccccagccccgcccaggcttctccgggatggaccggcctcccggggcacagatgaggaccctgaccccggaggggccagacactcgctccagggcccctggcctgaccctcttcccctcgccccttcaggtacccggaaattaaagaggagctggaggagctggaccgcatcacagagcagacgctctttgacctgtacaaatacagctccttcaccactctcgtggccggctcccgcagccgtcgcgacctgcgggggactctgccgcaccccttgcagcgcctgagggtcccgcccccgcctcacggggcccgtcgagcccgtagcgtggcctccagcttgcgggacaacaacccccaggtggactggaaggactggaagat

SEQ ID NO: 13190 - DNA, 1140 bp, Homo sapiens
aggtgacttggtgacttagcaggcaggctgagctctaacctagggctactggcttctgatcccagaggggctctttctaaccacaccagcccagctgaacttgacttccgaggtctcttcccagggaagatatggggactttcagctttgtaaccccacccctggtacttactacactcaagctcgagggaatgcaccagaacctgcccctccgccccccaactttttcaaaagacagggtcttgctgtgttgcccaggctgatcttgaactcctgggctcaagcagtcctcccacttcagtctcccgagtagctggaactacaggcatgcgccactacgcccagcatggccctcttttgtgaaagcctggaagggggccctcctgggtctgcgggttagggagtgacaccctgagaccccccccttctcagaagctggacaggatgaggcactagtactcctggccaaatgcatgatgattttaggtgggacacaggtgagccaggttttatttttgtggttatttactttctgtaaagccttagggggaaaaaagtataagtagcccatcaaacttggcttcaccaggtcgtggtagagtactttcatttccaatgaataatgaatgtctgtttgtgaggccctcttataagatttgtaaggcagctattaggtaagtgaatgtgaagataaaatgcgtggagatggcaaatcctcagggatctgggagcctgggatgaaatttggcaaatgtggcctccgtggaagccgctggaagccagagcccacagtttcctccaccctgagcttcctggttacagccgcaggcaagctctgctgatgggcttggaaagagtgactcccagctggcctgcgtcggaggtcagagtgaccgggagcaggcgccgtgcctgctgcttggcgcgccacgcccagcctggtcagcagctcccatggccctcggtggcccatccctgtggcctgcacatggctcagggctctcctccccagaccaggagttcccaggctctggctcactccctctgccgacatctgaggaaccccccaaagccgggtctgcaacacccctcctgagtcctcccccactgccctgccacagcttcttggtgggactctag

SEQ ID NO: 13191 - DNA, 1138 bp, Homo sapiens
agtagctgggaacataggtgtgccaccacaccagattaatttttatttttttttgtggagacggggtctcactgtgtcgcccaggctggtctggaactcctgggatcaagcaatcctcctgcctcggtctgccaaagtgctgggattacaggcatgaaccacgggcccccaccaccacgttttaggaaatgttcacattggagtgtgccctctgtttccagctgggcccccgactggtcattgtggtctaatggagtgtggtgccggcagctgccagcgcctgccctctgagaggggtggcgaggggcacacaggaccagactgcccctactgttggatgactgggtaagtcgctttccttctctgggtctctgttttccaatatttaacatcttgttgtgggctaagtgaagtccaagtcccttccgattctaacatgaggttgtcccggaatatctattttgtgttctgaatttaataaccggctgtggagggcaccacaggcaaatctgtactgtgagtgggttgctgccactcaattatctgacagcagctgcgaacaggtgggcagtgtgttttccataggcagcgacgacttttggaggtggattcagaggcacaactaagccgcgcggcgcatcagggttcaagggcatggggctcccgcagctgtggctggggcagagctggggctggtccctccctccaggagcacagggcgggcggtccagcctcacgtctctcggcctccagccacacccggcccgcgcagtggggggcccaacagacttttccttttcgggcctcagtcttctcgtcagcaagggcggacaaggactcttctcgtcccgccagaggaggcgaccgaggggcctgagctcaggtacaggccggcgggctcaggaggcgcgagcgcggatcgaatccgcgggaggagcaaagatccttgatgcgcggccggagggcggggcggaggacgggacccacgcgattggtatcctgccctccgccccagccaatgagcggcgagggtgtcttgggggcggggcagaatcagcctttaagttgcagtgactctccggcgtcactgttgcgcttcatagacgccgcgtgtacccggttgtcctcaggcgctgtc

SEQ ID NO: 13192 - DNA, 1138 bp, Homo sapiens
cactcaggtgagattgaaaggcttgttaggagtaacagtagatgctcccatcctgtaggaaatgtaaggtgttttttttggttttttttgagacggagtctcgctctgttgcccaggctggagtgcagtggcgtgatctcagctcactgcaagctccacctcctgggttcacgccattctgtctcagcctcccgagtagctgggactacaggtgcccgccagcacgcctgcctaatttttttgtattttttttttttttttagcagagacggggtttcaccgtgttagccaggatgatctcaatctcctgacctcgtgacccgcccgcctcggcctcccaaagtgctgggattacaggcgtgagccatcgcgccgagccaggaaaatgtaaggttttaagaactttgtacaagaaccaaatagaacaaaagatgctcctgtcacccttcccactcaggaaattacaaggaatttatgagctttgtgtcaggaaccagggactaagaccaataaatacctgctgcttatcacacagctccccaggtccgctcccgtgaggagcaggctctgcctttgcaagcactttcacgaacagcagatccatcttcctcctgttagcaatcaggcggtcagggtggcggccacttccctgccatgccgcagagaccctgacctcctccgacatcatgctccggccccggcttctgtcctagctgtggctcgctggtctcgagatggctgccttgccccggctgtttcatctgcattccaggcaggaaggtcgagaagggcacgcctgggcttttcttttgaagactccccctgagccccaccctgccgcaaggggcttgggctgtcaccctgtgggctgagtccagggctgccgtgttggagaggcgtgtgggaatgtgcgttttgggatggcagcccgagcctcctacaacttggcagagttgtcaggatttcaagccccgtgtgtctttgaccttttacctgagctgtgtgagaagaggcattttcttgtttctttgcgagtccttcctcactgcacttcagccagggcgccgacacatggtcgttcgacttctggcttggcctcttttgtgagtgtggggcctggtcatatcctcttggtcag

SEQ ID NO: 13193 - DNA, 1135 bp, Homo sapiens
tgttttgttttgttgagacacggtcttactctgtcacccaggctggagtgcagtggtgtgatcttggctcactcctggcctcaagtgatccacccacctcagcctcctaagtagctgggaccacaggtgtgtaccaccacacccagctaattttttttttttttttttttttttttgtagggacggggttttgtcatatcacccaggctggtctcaaactcctggactcaagggatcagcctgtctcagcctcccaaagtgctgggattacaggtgtgagccactgcaccggtcctgatttgagtttttgtaagacagggaacaatgttcagaatttagcaccaatgtcagactcattctgtaaatttttattgaacgtctgcctggtgtaggagaggaagatgacagacaagaattcttcctccaagagttacaggtcagttgagcagaaaaggcatacatcaatacccacaatgagagttgtcgtgattcagaggagggacaaagtccttcccctggagggatcctgagcactttggagaggaaaggcatctgtactgccccccaaatgtgtagaatgggatgcattcctggcagaaagaagtaggataaagtacagaggccagggctgggtgcagtggttcacgcctgtaatcccagcactttgggaggccgagacagcagatcacctgaggtcaggagttcgagaccagcctggtcaacatggcaaaaccctctctctactaaaaatacaaaaattagccaggcacaatggcaggtacctgtaatcccagctacttgggaggctgaggcaggagaattgcttgagcccaggaggcagagatcgcagtgagccaagactgcgccactgcactccagcctgggcaacagagcaagactctgtctcataaaaaaagaaaaaaaaaaagtacagagtccaggaagcctggggtggggctggcagatgccgagtcatctattttggccagagttcaaggcttgctaggggacatgaagagaagattcgtgcattctagttcaaactccaccagatatttgagctccttctctgtaccaggcattgttctaagatacgtaagtgaacaaaacccatgacaccctcgtctatgagagc

SEQ ID NO: 13194 - DNA, 1132 bp, Homo sapiens
cctcttcaactcacacctgacctaaaacctaaatgcattattttcttctgcaatgctgcttgaccccaatacaaactcgacagtagttccaaatagccagaaaatggcactttgaatttttccatcctggaaaacctaaataatttttgttgaaaaataggcaaatggtctgagatgcctgacatccaggcattcttttacacatcagtcccttcctagtctctgtgcccagtgcacctcatcccaaatcttctttctttccctcccgcctgtcccctcagtaccaaccccaagcgtggctgagtctttctaatcttcttttctacagacccatctgacctctcccctcctccccaggctgctcctcgccaggccaagctaggtcccaattcttcctcagcctctgctactccaccctataatctttttatcacctgccctcctgacacctggtccggcttacagtttagttccgtgactagccctcccccacctgcccagcaatttactcttaaaaaggtggctggagccaaaggcatagtcaaagttaatgctcctttttctttatcccaaatcagaagcgtttaggctctttttcatcaaatataaaaatccagcccagttcatggctcgtttggcagcaaccctgagatgctttacagccctagaccctaaaaggtcaaaaggccgtcttattctcaatatacattttattacccaatctgctcccgacattaaataaaactccaaaaatttgaatctagccctcaaaccccacaacaggacttaattaacctcaccttcaaggtgtacaataacagaaaaaagttgcaattccttgcctccactgtgagacaaaccccagccacatctccagcacacaagaacttccaaatgcctgaactgcagcagccaggtgtttctccagaacctcctcccccaggagcttgctacacgtgccagaaatatggccactgggccaaggaatgccgcagcccgggattcctcctaagccgcgtcccatctttgtgggaccccactgaaaatcggactgttcaactcacctggcagccactcccagagcccctggaactctggcccaaggctctctgactgactccctcccagatct

SEQ ID NO: 13195 - DNA, 1129 bp, Homo sapiens
tattgcctttattccttggccttctttgcaagggtatcaaagaacactgctgcagtacttcctgttctacatagtcatgtgacttaagcaagagcatctgccagccagtgaggccccttgagagcctggttaaacatgggactgaagggttaagtgaatcactttttattcatgttgaaatatgaatgctgaagtttggaaaattttatatataacattttaataactaaaaaaacttgacttaggaatagtgcttatattaaaatcagtgtttgtcattgtttcatgaagtttttacaaatctaagaggcttaagagggatataatagtccactttgctttagttgtgttttacttgatattactgattgctttaactttgaaacacagaacaatgctatagtaagaatgtagtatactactctattaacccaaaacataatatagataggtttattgtatatttgtggagaaaagtttattctaacgttctttttacaaatagtaaaaatgctatttgtaggatgctctgatttttactttttgtaaaaagaacattgtctttttaccccaacagaaaatggcaagcgttcagctttctttgggaatccaaaatctcttatgaggcatattaggtatcacatgtgacataagcaaaagcctgtgatccttagcatgttggaaagttgctactctttaggataaggttgtccatgatgtctaggtcattccattcagctgcataaacaattcctttgatggatggctggttttctacaaccccagcattattttagcaggagaaggtagtatttgatgtgttgcaatttgtgttacatgcccatggaacatctctggacattacctcaggaggaggggttaagagaaggaggagctgtggctgaagacatttaatggcagaatgaatggaaattcaaagatcgctgtgcagtcagccttaaacactgactgcacccctcccagatttcttttacattaactaaaaagtcttatcacacaatctcataaaatttatgtaatttcatttaattttagccacaaatcatcaaaatgacgaggattttgacagctttcaaagtggtgaggacactgaagactggttttggct

SEQ ID NO: 13196 - DNA, 1128 bp, Homo sapiens
actagcatttaacctctgtgccccagcttcctcttctgtgaaaggacagtaatgacagtacctacctcactgggttatgaagattaaatagaataatgtgtacgcagtgtttgtagcaatgcctggcatcaagcactgggtaaacagtatctattattatcaaaggcctttacgacaacaatcattcttcaaacggccctccagcgaacgctgggcgcaaactccacggtaacggggaccaatgttgttagaggttgaggttcctggtaggtcccaggtgctaaaaggaagagcagcctttgggatgtgagcccgaaaaccatcgtgttggcttctgaagccccaagatgggcatggcagggacgcggaagccctcagaaccgcggaagccctcagaaccgcacagcaggtggccgccgtggtgcagcgcgcagtcggccctcagctcccctgcaccggcgcgagctgcgggcgctgcccacgtcaggctctgcagacaccagacagaaaaggtcttccggccagggagcgtgggggaaaccctgtggggccgcgcccgtcagtgtcaaggaaaaacggagaggaaggcccttgcctccagggccctcgcagcagaattctgcccggcctgccaggaggccagcggggcacgggctgagggtgcaggatccggagggcgccgcccgcccctcgggcatcgcggggcccagggtccgcggggcctctgagctgaggcggtccaatgtaccctttgtccttcctcagattcattatgaaatccgaggcagtctgggcgactccagcggcgttcgcccgccgcagcctctcgaccgccggccacccgccagccacgcgcgcccagacaggagggcggccgggcgctcggcggggcggggcctgccgggggcggggcctgcgggcggggcggggccgcgggagggcggggccggcgcggcgagcgcaccagcagcatcctggctcagccgcggcggtggcgggggcgcaaccagcgggccgaggcggcggcgccagcggcgccttaaatagcatccagagccggcgcggggcagggagtgggctgcagtgacagccggcggcggagcggccggtccacggaggaggtgagtg

SEQ ID NO: 13197 - DNA, 1125 bp, Homo sapiens
gttgtaccgagcgtggttctggggacaccgtgcggcctcgattggaggtggctgtgatgaagcgcggttaccgcacaatggaaacgtgggcacctccgctcccatgaaagcctgctggtagagctccgaggccggccggtgcgcctggacgggagtccgggtcaaagcggcctggtgtgcggcgcgccccgccccccgcaggccccgccctgccaggtcgcgctgccctccttctacccagtccttaaaacccggaggagcgggatggcgcgctttgactctggagtgggagtgggagcgagcgcttctgcgactccagttgtgagagccgcaagggcatgggaattgacgccactcaccgacccccagtctcaatctcaacgctgtgaggaaacctcgactttgccaggtccccaagggcagcggggctcggcgagcgaggcacccttctccgtccccatcccaatccaagcgctcctggcactgacgacgccaagagactcgagtgggagttaaagcttccagtgagggcagcaggtgtccaggccgggctgcgggttcctgttgacgtcttgccctaggcaaaggtcccagttccttctcggagccggctgtcccgcgccactggaaaccgcacctccccgcaggtcagtctgtctgccgaggcgctgcccggcgacctcttcagatggattattacaggtagcgggtggcgtggtaggtactttaaaggaaatcaagcgccaccgcctcgatgcccgcagcgttgtccccagattgcaggaaccgttacgcgccttgcggggaggggaagggtttggcgctgggttacagcgaggtggaaacacgccccttctcttctccaagggagagtgggttggggatgggaaggggcgtcttcggccatttctccagagagtcagctccgacctctccacccaacggcactcagtccccagaggctggggtaggggcgtggggcgcccgctcctgtctctgcacccctgagtgtcacgccttctcctctctgtccccagcatgggcaccagcctcagcccgaacgacccttggccgctaaacccgctgtccatccagcagaccacgctcctgctactcctgtcggtg

SEQ ID NO: 13198 - DNA, 1122 bp, Homo sapiens
tgagtcggtgtcaggttgagttaatatttggagagtttctggcacaggtaggtgctccttaagtgcctgttaaataagtgaagctttgagaaagtgtctaaaaggcgacacactaaatttttaagaggctggaggtgggccagggaggggaggtctcttatgtaatattttaatatctttttaaacctgaagaatgtgttcttgtagcactcctgtaattaaaacttaatgaactaaaagtacacccctcctgctcataccccttttgaactccgcagccgcgccccccagccggaggccccttgggcagcagacaatgggtgtggattcgccccaggtcccgccggctggggcggcgacaatacaccagtccccgacagctatttacatgacaagggcttccgggcgtgtctacgcgagttcccgtctttcctggtcgtcctccttgggttcgggtgaaagcgcttgggggttcagtgggccatgatccccgagctgctggagaactgaaggcggacagtctcctgcgaaaccaggcaatgggtgatccatcttgggggcttcctccccctttctccaatttctcttccctgagcccccagggaccttgtgctcctcagaagataggctagccccaagagcctgggtcaaggaccccagggacgggggcgaggggagggcgcaccagcaacccgcccgggtgcggctggcaccgagttcggctccccggccccgggcgtgcgccgggcaggcgttccaagctgaccgccgttggggagagggcacagcgcccctcctccgttgcgcgggtgccgggtctacgtgggccgcctagctctggccctttaagagcccgccccgtttcccgtcaccccgccccccggctcggggagggggtgcgggggaacctcggcggggattggcgcagcgcgcgccccctccccggcccccgcgcggtgggaaccggcagccccgtctagcgctgacgtcagaccgtctgcctgcctccgaccgcggtctcggagcgaaacccgatctccttggacttgaatgaggaggaggaggcggcggcggcggcggcggcggaggcgctcggctggggaaagctagcggcagaggctc

SEQ ID NO: 13199 - DNA, 1121 bp, Homo sapiens
atcttggacactagaccctgctgcataagaacatggaaataaatcagctcctccagaaagcccatgatacaggttaccccgctccagtggctcccctcctgttcacagtctgtttcaccatacgcaaacaacccacgtccaaaccaaatttgtcatcctgacctttgcctctggggattgggaaaacacagggctggaagcatctgctgtttcctctctattttattcccagtcatgtcctggtttccatcctgactacaatgatggtcttacaccaattagagtgaataaactccagctccattttcttccggaaagagaattgggagtccagggaatgcttccgggactgccaaggaaggttctggagggaattcccctggtcagtccaggaagtggagatgggccccatggaactggaaggaggcccaagctaatgtgtggctgagctcgagctcgtttgcttgggatgagcgactgatgttctgcaaacataactattacaatgtttgcattttcttaattttcgttgggtttcattttccatgtcgttagtttcctggatgaatcttgaataggaaagagtcacactatgtgctgggcactcttctagatccaaagacacatttgtgaacaggacagacaaggtccctggtttcaaagagcttacattctaatgaggtatgcagaaaacaaataagccaacaaggaaagaaatggtaatttcagaatgtgatgagtaaccctcattgcatctctttgcatctctttgcatctctagttgtgaaaccttcgttacctctctttgcaggtgtatttgaataaaccaggttggcaaatcatactatagctgaaaggtgagagaaaatctaatttctttacttggtctttataaatctggtcttcctcatgatcccccacttgctggttaatgagggaaaaataaatgttttggcttaccattttaagaccttgtttgagccaataatttaagtcattttatcaaataattctcactaaaggctctgtctaggagttgtcacctggcagagaaagaatcaggaacctgggcacagtgacctctgctcctaggctttcccaggggaggtcttttgtctact

SEQ ID NO: 13200 - DNA, 1118 bp, Homo sapiens
aaagacttggaaccaacccaaatgtccaacaatgatagactggattaagaaaatgtggcacatatacaccatggaatactatgcagccataaaaaatgatgagttcatgtcctttgtagggacatggatgaaattggaaatcatcattctcagtaaactattgcaagaacaaaaaaccaaacaccgcatattctcactcataggtgggaattgaacaatgagatcacatggtcacaggaaggggaatatcacgctctggggactgttgtggggtggagggaggggggagggatagcattgggagatatacctaatgctagatgacgagttagtgggtgcagcgcaccagcatggcacatgtatacatatgtaactaacctgcacaatgtgcacatgtaccctaaaacttaaagtataataaaaaaaatggcaaaaaaaaaaattttcttttatattagcactaaccattaccatttcaatataatcccctaaggtaattacaatatacatttgatcctgcttggtttccaacccagtccctctagtctgtgccctcctacctctctggggacttttctccatatttaaaaacaaaccaacaaaaaatcatctcttgaccctgagtttctctctcaacctgtatctagatgagtataaatgcaatacctttcattttctcccacctcctttatactctaaccctgttgtaatctggccttctagcatttccacatttttgtgtttcagactagatggaagagctgctgtaacctcactcagtgtggttcacaataggctcagatgagctaagccattccgaacatcatatttctaaggaaagccaactggttttttaagaagcaaactgattccaagttggttaaaacctgcttacattgattctaatcaggtcaagccaaccttcctgggtcatattgggtaaagccagctcaaacaggataaaacagtcccaaactgacacatcagattccaagcagttcctgctgatcgagaccagataagcctgcatctaacttgtccttactggatcagaccaacgtgaattgaatcacagcagttcagaaagaggaaactggattcaggcaagtgatattgct

SEQ ID NO: 13201 - DNA, 1118 bp, Homo sapiens
aattgcttgaactcaggaagtggaggttgcggtgagactccgtctcaaaaaaaaaaaaaaaaaaaaaaaaggagagagtaggatggctgagccatgacgcagtagcaatgcttctttttttttttttttttttgagacagagtctcgctgtgtcgcccaggctggagtgcagtggcgcgatcttggctcactgcaagctccacctcccgggttcacaccattctcctgcctcagcctcccaagtagctgggactacaggggcccaccaccacgcccggctaattttttgtgtattcagtagagacggggtttcaccgtgttagccaggaagcaatgcttcctattctagcgccttgctaaactatgtgtgctgcagactgtgttcgtgattccgaatcctaaaaacaaccgtcctaggcttgtctctcagcctagactctagactgatttggctcatttggttgtcttggagacgttctaattctgaagggggcagtggtcccttctagaagatagctggtctgcaaatgcacacctctgcttagtctgaatcctaaagttatagcttgagccaattaaagtggcttctcatttttctctcactctgatctcaaggagccctttttcttctagtaatctagaccttcctcttcctatcacagtctcaaggattgtgcccccaaagcagatgcaaagccctgtctaccccttctccttcccctgaggtagagctttatcgaaggtttctcttggtaaacgttagctttctgaactaagggccgtcttttttttttttcccgcttaagcccattgcataacaatctcttgttttaatcttttgcccaacactgcttttcttactgtcagaggttactacaagtgtttgaacaggtaacttctacctttgaacttctgttgtgacagattcaaaggttccaggggagtgtgttggccactctcaggacagtacacagtagcttcgggtgtgtcccagtcagtcctaggagctgtggaaagagtagaagtgcctgaatgtggtgctgaatcaatacagccagctgtgaggggagcacttcctggacccaggaagggagagtcttcttccaaggtaagctgca

SEQ ID NO: 13202 - DNA, 1116 bp, Homo sapiens
accaagaaagcagagcagaggttccgcaattcttttctaagattgtctgactagagggttcaaagccctctaatccaaggccggcttgtgtctctagggaggttgcagaaaggcgccagaatgtggatggcgcggacaatgtgggatactggagtctcgactgccgcgcgccaaggaagggcgtcacctagccaagccggccctggagttgagtgccccgcagcccgccggtccacccgcccggccgcttgctggcaccctggtggccgcgccggctttgtgtcggcatcaggtgcaaacccccagagcgccgggcgtgcgcgcacgcgccccggagcgcgcggagcccattcgttgcccccaccgggatctcctctaggatctcctccggcgcccggggccggagagtgggggagggaggaggtcggacacgtagcctgcctcgcagcagggctcgactccacgcgggagggcgggggagccggggacccgccgctccagcccgctggccttcgaaagatcctcctgggccaatggcaggcggggcgacgcgaccggattggtgcaggcgctctgctgatcgctgtggaaactcgggcggcggggaacgcgggaggatgtggaacccgaggcggggggagccggaggggcgggcagaggaggtgtcgaggccctgagctcccggggagtttttactggaggcaaaagtccatagcgggagggctgagggaggggcggaggaaggggaccgcttgggggcactgggaagccagggatcctccgccaggaaggcagggacactcccgagcgcaggcgagaaggctgggggagggggcgcggtgggaggagtaggagaagacaaaagccgaaagcgaagagggcccgggctgcacacaccggctgggaggcagccgtctgtgcagcgagcagccggcgcggggaggccgcagtgcacggggcgtcacagtcggcaggcagcatggggaagggagggaaccagggcgagggggccgccgagcgcgaggtgtcggtgcccaccttcagctgggaggagattcagaagcataacctgcgcaccgacaggtggctggtcattgaccgcaaggtttacaacat

SEQ ID NO: 13203 - DNA, 1115 bp, Homo sapiens
atcactatgaggaagaggagggggaggggaccatggaggccgtaatgtctagactctttcttccctgtcttcagttcaccaaatgtagttcaactgtggacaaaggggctctttgaagcgtcctctaaatgtttaaaattttgtttttagagataggatcttgttttgttgcccaagctggtcttgaactcctagcatcaagcattcctcccatttcatcctcccaaagtgctgagattacaggcatgagccaccacaccaggcctatatttatttatttattagttttttgaaatacagtctctgtcacccaggctggagtacagtggcacaatctcagctcactgcaacctccttctcccaggttcaagccattctcctgcctcaacctcccgagtagctgggactataggtgtatgccaccacgcccggctaatttttgtactcttagtagagaccgagttttgccatgttggccaggctggtcctgaactcctgacctcaagtgatctgcctgccttggcctcctaaagtgctgacattaccggcgtgagggattaccggtgtgagccaccatgccctgcccctaaatttattttttaattgtcaagttgttaccagcagtgaatccatacaggtctgcaacaacctcagttcttgcctcctcagaagaaagaattcgaccaagggggcataaggtagagtgagagaccaaggcaagttttacaacagtagtgaaagtttattaaaaagttttatggcgggaatgaaagaaagtgaagtacacttggaagagggccaagcggacaacttgagagagtcaagtgtgctgtttgacctttgacttggggttttatatgttggtatgcttctgggggttgcatctcttctcccctgatccttcccttaggttgggctgtccgcatgcgtggtggtcggccagcacctgggcggggggaagcatgcgcagtatgtttactgaggttgtacgcatgctcacttgaggcgttcttcccttaccagcgcagtgctaccagaggaagctaaaccagttaaactacgccattttgcctcttagtgggcatgcttgagtccactcacccaactcctgatat

SEQ ID NO: 13204 - DNA, 1114 bp, Homo sapiens
tgcaatttagcctgagtgacagaatgaaaaaaaaatttttttaaaggaaaacacaaaaagaatatgctgtcaacagggatgggaggaagaccacctttactgctatacacatttgtaccttttagatgttgatcaatatgaatatattatacacacagacacacacacagacacacacacacacacaaacaatacaatttaatatcctaagaggatattgacattagacaggtacaaaagctctagaaatgaggactttcctcagtgatgacttttttcaccaccaaagtcactcaggcatcctgacaagggtaagtgaggggagcctccttggaaaataaactcacttggatagtgaactcctgcacatacctcaaagcccatctgaaatgtcccctcctacaggaagttttccctgaccctccaagaagcagagttctatttcactggggaaaacatttcttcttcttcttttttttccctgccctgcacatgagctagaaaacatttcatgaaactgggagtttctgtgctgggctctgtccctcccccattctacttcccctccctcagcatggaagcctctggaagtggggctctgactcccagcctacagagagattcctaggaagtgttcgactgataaacgcatggccaaaagtgaactggggatgaggtccaagacatctgcggtggggggttctccagaccttagtgttcttccactacaaagtgggtccaacagagaaaggtctgtgttcaccaggtggccctgaccctgggagagtccagggcagggtgcagctgcattcatgctgctggggaacatgccctcaggttactcaccccatggacatgttggccccagggactgaaaagcttaggaaatggtattgagaaatctggggcagccccaaaaggggagaggccatggggagaagggggggctgagtgggggaaaggcaggagccagataaaaagccagctccagcaggcgctgctcactcctccccatcctctccctctgtccctctgtccctctgaccctgcactgtcccagcaccatgggacccacctcaggtcccagcctgctgctcctgctactaacccacct

SEQ ID NO: 13205 - DNA, 1113 bp, Homo sapiens
agagatccctgtttacctttggccaagcctgtttgtaccagattaattcctttgaccagagaaaaatgttactctgtgacctgaattcttcttttcttggtcctgaaaatgggtcacagacacttcctttattcactgggtttatctgctctctcggctcttggaagaatccccctcgatttgtagcaccaagggatctataggatacagccagctttcactgttgagacatctttgttcaggacacaacttaccaaaaaacaaaaaaacaacaacaacaagaaagggctgccctctttgatttaatattctgcactttgccgtggcatttatgtaagcaatcctgttcatctgtaggaacatagagcaacctgtgctgggagtaagctccttgaggacagaggccatgtatgcatcatccttttgtcttcctgatatagcctggtccattagagatgtcactctaagtgttgccatctttgggaattctctggctttgtttgctccatacctccccagccagcctggaatgggagtgtcccctgcactctgtgctctagcacaatagcacataccacattattttgtctgtttcctccactagaatctggggagtggatctttcagttctctatccccaatgccaaatgcagtaggtgctgagtacatgtggaaagaaatgaatgagtggaaggcactagataaaggttagctgagttgaattgaatagagcaggcacaccctctagctatcactgggtgggatttagtgcaggtgatgtaatgtgacttgacagcgtagttaaatattgacagacaggaggaagcacactggccctgttcagaaagaggaaagtaagggctgactgaggctgtcagatcagagagctgaggctggaagtggctacagtggtcctgatgacccagctgaggtcactggttggctcttgcttcagtagaggtaagatttggatcctggctgggaagataatggattgtgatgtgagtaaacgcaggctgtgcctgtggcttggagatggcttgtatcccagacgctctctgctggctgcccacttgtatatagctcagactgatcctcatttaaggcaaggaa

SEQ ID NO: 13206 - DNA, 1113 bp, Homo sapiens
tataagcccccatatatctgcccttggtgctgggggcaaagttcagggagggctccgatggccgtgttgggggcaggaaacagtgaggggtgggatcctggggctgactgctgggcggttggggacaccacccctactggccagccagtgtcccaggcccctgcatccagcggagagagcagccactctttgcccctctcctcttcagcacaatagtggctcctagcctaggtgccctgccataaggatttggagctggtggagtggggtatggccccaggccataccccagcctgacctgccaggctcctaggccaatggcagctcctctgggttcaccttctgagactgcttcctcaaggtgagaggccagggctttcatgatccaactgtgtgcatcatgggctgacttcagtctcctgaaccccaggactccatcgtcgtcaaagccagaggtggagcagagagtcagagcaagcacatgggtggggggcagagctgggtttgaatccaggcgatgccagtgttcctgtatttactgagcacttgctgtatgcctggcaggagggtacgattcctcggatcatgggacaaggggcttagcctggctgagcccctctcctcagggtttcagtgggtgtcacaggaggacctcccaatgaggtccaccttgctgtcctgttgcttttctgtttggcctgattggagtgttcccaagggcagggatttctgtgctctgagtgtctggtacccagcagggatgggaggggaggcaagggagttagatgccagccctggagggtggatggggcaagcaggacagcaggaaggaggctagtggtgcccaaggggcagagacctgggaacccagaggccagtgatggaaagggttagcgccaggcagagaggggctggacccacacacaagaccaggcagagcaaacaaacgtagaggagaagggctgggggcaaagtcctggggagaggaccagccactgtcagcagtgccagggccaccacccctggggaggagccattgggctactcttgaggggccagaggtgagcctgaacactccacagctgctgctcctagggaggagctggtaccatg

SEQ ID NO: 13207 - DNA, 1109 bp, Homo sapiens
caccaataactaatgccattcccttccatggaggtaatagctgtcaagagttgagtgtaattacttctgttcatgtatctaccataggcaccacaaatactacacacacataggatatacacacccatatgtattttttattttttaaatttcctcctcatctttaatgttcttgagatgtaggcatcagggtgtatgtgtgtagagtccatttattatccttttacatcattgggactattggagatgacttaaaatttatatcaaagcttcattatccattatgcctgagatgtctctggaatatgaccatcaaaagttgtattatattgagattcccccttcaaactataagttctccaaaccctaatattagcagacctgggaggggaggcacataaagcaggtggtaggtagcaccatggtgtggggccaaacagacctgaagtctacagatacatatggtgcaggctgcctttgatctccttctttaaagacccccaatgggctgggcatggtggcttacacctgtaatcccagtactttgggaggctgaggtaggcagatcatgaggtcaggagattgagaccatcctggccaacatggtgaaaccccatgtctactaaaaatacaaaaattagctggacgtggtggcgcgtgcctgtaaacccagctacttgggaggctgaagcgggagaattgtgtgaaccagggagtcgcaggttgcagtgagctgagatcgcaccattgcactccagcctgtgacacagagagactcaaacaagacaaaacaaaacagacccagtgtacatggtacttacggtgacatctctgcactttatttcaagaagtccaggcagaggtcctaaagtattgaattgaggaagaaaagccattgcttcccaaagggtgctgctgcacatgggtgggaggcggctaaatccctggcacatgcatttgtgtctacaggggcattgtgacctcagccctggactggcccagctagaacctggaaaaatgccctttggtttattagctgctagactcactccagtggtgggcagctgggcgaaaggccctgaaagttgctcttttctcaaaattcagcc

SEQ ID NO: 13208 - DNA, 1107 bp, Homo sapiens
aaaggtaactggagcctctccccaaagagactggttcccgtcccattcttctccaatccgggtggatttggcaaaagcccaagtgaccctccctagcaattccgcaaagccccatctcccgccccagactccagagtctcccgaccactctcatttcggagaggcctaggggcacggacccggaagcgtgacagaggccgcggggtaagaggggggcaagtgcaggcgcaatccctcctcagcctcgttgtcccgcccccttcccaaggccccagccaacctgttctaggcgtcgccggtcctcggatttcttctttccgcctcgcgtggtcacgtgacgggggaggggcgggatacaaaaagtgctttattttcccactccccggacgcccagcagggcagtttcttgaccttcggagcccctttcccgaggatccgctcgggagcctcccctggccaggagcaggggattagtctgccccgcgaccggccccagccacgacgcggacatcgccccctctgtctgggccgctgtcactcacgcgccaaagggccacggagaaagaaggggcgggccggggcgggccgggcgagcggaggcggggacttgcgccgtcctgaggctgcctcctagggtccggccggcgctggagctgcggatttagattgtcactgccacctcggtcggtgcttacttcgctgccagctggtcgtcgccatgaacccggacctgcgcagggagcgggattccgccagcttcaacccggagctgcttacacacatcctggacggcagccccgagaaaacccggcgccgccgagagatcggtgagggcggcgggcgagacctccctcctttcccgagaaaagctggagactccctcgatgcggagtcaggggcgctgtggggcctaggccctctggcccagcgttaggggagccgggacccccacttcgaggaacagcctgtgtccctggtggggggatatcgccattccccaggtgtgtccgcgactctgaagcctattgtgattcagggagggtggaacggaggcccgagtgtctgtctgccttttaatgccctttaaccccctttcagagaacatga

SEQ ID NO: 13209 - DNA, 1105 bp, Homo sapiens
ctacaggacagttccattcccagacctgagctttggacaactgaatcttatgccccttcccacccatggagcctggtgccggaagttcccaggacttacccaccgtccaccacgccacatagcaagcgtcctcagtgtctgcagaccagaaacacctcccttgtgtctcagcactgggccacctgctgaaaccccaaactgcctgccccattgtttgagacccagtcaggccttggctccaaaagtcctctgggactgctgctggcccccagggtctctcctgactgcacctcggtcccggagctcccacaccgctgagccccgagcccgatgtcccgatccagctctgggtcctttacgggggccttgctggcctttcctaagggaggtgttttcccgaggacaggtggactgctcctcagactaggggccctcggagggccaggcctgggcttctacctcctctcgcaggctggtgtttctctgcaaatatggctcgtgtgtcctccttcctctcagactgggggcccctgaggactgggcctgagtttccctttcccccttcacaatgggggttccctgaggactgacccagggcctcccccgtcccctccacctggctgttaatctccaacacttccacctccagtcctattctgcacagctctccccagcgctgggggctcagaggcctcttcagccttccccagggctggggctcagggagggcttcctcaggcgctggccccagagtcaggctgcacattggcttggaggacaggcctttcctctgggactgagaggcccagagtgcccacccagagctccacctctgacctcacaaaggcctgcttcagaactcggtctccacggcactgctggccggacgagggatgttattttgggcagtgcatctggacttggttcaagtggcaccagccaaacccctgccttactgacctctcccctggaggagcaggagcagcgctcgaggccgccctgggagagctgagaggcaggctctggactggggacacagggatagctgagccccagctgggggtggaagctgagccagggacagtcacggaggaacaagatcaag

SEQ ID NO: 13210 - DNA, 1104 bp, Homo sapiens
ccttctggacttctgggtttgtaatacattattatataattgaagcctagtatgaattaggatattttattagatagctacgacttccagaatatttgaacaattgtaatctggccgtatacctgtaagatttacaacagtttttaaaaccacaatattctatagtatttttaggtggattagtatcaatttaagcatcaatcttatgccagtatgtcatctacatctatgcaagcagtaatattttagaaactttttagaaactggcctaatttaaatatgggctggcccttttgtaagttgatgaatgggacccacagaagttgaaataatatttaaagtttgaaaaccattaaatataattgaaactccctcctttaaaaaaaacaaaaacaactaaactcagaatttggaattcaaaattacttaaaaatgataaaaatctctaaccaaaaaggaacgtcatatgttggcttacaggttatccaagggaaattctgtatcagtttgcacttaaactgtatttttctggttcaggatgattatatatttctttacctacttgatgtggtatatttcagtttttaccatcccactgggagatgctttatcacacatggatattggatgtccagaaggaaagccctctcccatcttcccccctgtgctttgttgaactggacatgtaataaatggctttgcaaatagtcacaattattttgtggcttgctgttgtgctatactaaaagaccattaagcagagtccaaaattctgtaaaaaatagatgatctgtaattgataatttatgtgtcttaaagaatgtacctgaacatttaatattgtatttataatagcatattgaatacaagtaacaaatggtaaactgcatgggccatgtgatacagagagagagatcagggtgagctttcttgagctgatggggtagataaggtctttgagatgggataaggttgctgtagggggagggcagaggtgggggtggtggcatctgagcatcccagatcagaagaaagccccgagatcacagagacccggcgagatcacagagacccggcctgaaggaacgtggaaagaccaatgta

SEQ ID NO: 13211 - DNA, 1101 bp, Homo sapiens
tggggataaactagagcaggaaattcgaaccatacatagacttaaaaaaaaaatccccttaagccattaaaaggcaataagcaattagttttataccagtgaaatcaataattaaaagttctacttaaaaaaatataacccatgcaacatcgtgtgtccactgagcagtgataggcgcctgtgtaaggaaaagagctctcatcatatcagctagcatttaaggagcttactgtgcgctcaactcttttcatgttatatgatctaatgtgagcatctatgccggtggatttcacatccccgtttcacggacgaggacacctccggtgacctgcagggaccccgcgccagtggctgctgcagctgactcatccgactcccacgcgcgacgctgccctagtggcgtttaaaaaaatcccactcgagtcccatttaaaacataagcaccccactttttaagtgtgactggtgacctcgattttaccttctgagtcacagcaccaagacctgtgtatctgtcaaactgagcacagtgggcgagggcgcgctgtgagagctggggagaagacaggtggagagcacaggtgcaaactaaggggagggctagaaggtaaaaatagcgatcaggggtatgggggtgcgcatggagacgcccgcggagcgctggcgctggccagcggagcaggaggtgaggtcggcggagctgggaggaccgcgcctggcggctgcaatagccgcacctgtgcacgtgatcgcgagcggctcgggcgccagggcggagcggcgctcacctgggcccacgtgacggggcggggctcgaggagccccacggccacgcctcctcccgcgcggcgcgcccggagcccgcggagctgagcggcggcggcggcggcggcaggagcccgggaggcggaggcgggaggcggcggcggcgcgcggagacgcagcagcggcagcggcagcatgtcggccggcggagcgtcagtcccgccgcccccgaaccccgccgtgtccttcccgccgccccggggtcaccctgcccgccggccccgacatcctgcggacctactcgggcgccttcgtctgcctggagattgtaagtgg

SEQ ID NO: 13212 - DNA, 1100 bp, Homo sapiens
tctgagacttgctctccctgtcttttggccccttgacattctgttctccagctcccatttcagcgtctcagcgggtccctagtcctggtctaggcatcccatggtgctaactggagagccaggccaggatttctcttcacaagaaacactggcttttcacaggcagccatcactcattggctagacacccatgacttcctctgtctgcagggctgaggcccaccccaccctcctctctgcctgtgcagtccctggcgtctgtggaggggagagggatgtaaacaaagagagtgtaattgattctctgcatgtcccctgtgtgctgatggcagtggggcagtaagtgggcctgcccgtgtgggtctctgctcctgccagaccttacaggactgctttgcggctgctgtttgggcacagtgtgcagtgggccccgtgtgctgtcttggatgtgacgttagtggctgtcttggcctctgccgcagtaattagatggctagggtaggcctatgatttgggtgttctcaagaacactgtgttgattgaatgttcgtgcatgctggtgtgtgtgtgtgtgtgtgtatacgtgtacatgcacatgagtgcgcatgtgcttgtctcaagcttggcctgtggggccgggggctgcaggtctcaaattcctctgctatttttaggagccatatcagcccagctgtcccggagctggggtgtgtgtccataggcaagtctcaccctccctgtccttgccctaaccccctaacactgcctgccccccaccccaatggctttaccctaagagccttctccttcccttccacacacactgctgtatcaccctctccctcctggcatacctgatacccgaagtcctccgggctgctggctccaactagggctgggcagctcgggacgggaggggccggggagagggcgggaactgggcggggccacagcctgtgctattttgagctgctaacggagccagagcagcatcagagcggagtctccttgctctgggctgctccaggccaggccatgcgggtgagtgtccctctgaccccccaccccggaaatgtcccaggctcctcatgctatttcct

SEQ ID NO: 13213 - DNA, 1100 bp, Homo sapiens
acacaagccggtgtctcattccgacacagcgtccgagctgcacaatgtcacacccgggtgccaaacacttggccccgcgcgacccggccctacgcctcctgccgccgctctccgcgtctccgggggaggtggcccggttcggccgggcagggggctggcgggcgagccccgcgggcgggctggcgagcgggtgatgtcacgggcagcggtgggtgggtcactcggaggtgaggcgccgccaggcgagttcagcgagagttcagccgcattgcattaggcaaatgaggcccggcctgggtgggggtgtgtgttaaggggaggacaccgggaccacccccctcttccccgccccaccacctcctccaccacggcttcgctcggccagggactgaccaaaccttgggggagcctgggagccggaactggtacaagggaggacgcccgcccctcttccgtccttgtcccctcgcagccccctcctctccctgtactcggcgtccctctgtactctgtgtactcctcatctggagcctttcccccttcctgcttctctcctctcctcccccttcccaggctgcccccacttgcctgtccacatgccgcctctccctctcggttccctgcgtttctcccgctgcagccggacgcgccgggaatgggttaagccaggggcggtgcctggacggggcggggcggtggaaagggggtggtgcccggaggggagggggcgcgcagagctggggtgggggggccgtggcgcgtaccaccagagaccgagcgagtcgccagctgcccctggcctggcgggggcggaaccgcgcgggatccccacccccacccggaatcctcgccacggagaatccctggagaagccccggatccccggctgggaggaggaagtgctcgttgacccccagccccgcgctgatcccgcccccggcctgcggacttggggagccgctgtactctgcctcggacgccacgagactctagacgggagtcccctcgaggtgaagccgctgagttcccgggccccgccaggcttccctgggagagccgacggaccccccctcccagcacacacaacttccctgcttttc

SEQ ID NO: 13214 - DNA, 1100 bp, Homo sapiens
gtagttgagcacgtacgcgaagactcccgggtgccggtcaaagaagaactcgtcggcgcccgggtcgtagtcgaagcgtgccgccgcctcgggctccgtcaggccggccagccgcgtccccggcagggtgcgcagcgtcgagcggtacgtctcatggcgcacgccgcccacgttgatcacgatcttgccgctgtcgccaccgccgccgccgtgccgccccatggccgccgccggcagcccggggcatggctcggcgcgccggtccccgggcccgcggggtgccggggggcccgccggggacgcggcggggccgggctgcgcaggctgctgctgctgcggcggcagcggtggcggcggcggggactcgggcggctgcggcggtggcgccggctgctgcttgctggccccctggcgcccgcggaaggacgagacgcagactgagctcagcattggacggggggcggggcgggaggggcggggacgcaggggcggggacacggggggagagaccgacgggattgggtgggaggaggagcgaggtagcgggggcgtggcttaggggagaggaaccaaactgattggcctgggggaggtggggcggggctgtggctgggaggagtggggcgggcactctaacgcgacccagctggacgagtcggggccgccaatgagacggagcgattggctctttctaagagagcagggaggaggggcggggcggggcgtcaagggaggcgggaccggttactactaattgtgttcggcagcactggtagccaggggaaggcggggctagatacgatagagagagaccttactgaactgaaaaaagtgcgggcggggtagagggaggaggggacacatccaagctatttaaagacgcccgactggcctggaggggcggggccaccatgagagaggccgtcctgattgggctgagaaaggggcggagagaaacaaaacagatcgcacgccctcacctaaaacaccgctaggcaggacctggtggggaggagcattgcttggaagagacagggccgcagaaagtagaaacggtccagatgagactgcatggggcgggaactagagatggaggactt

SEQ ID NO: 13215 - DNA, 1100 bp, Homo sapiens
gacctgagttgttccctctcttgccctgcttatttgtctcggttcagtataaactccgccttccgggttccagcggttctcctgcctcagcctccagagtagctgggtacaggtgcataccactaagcccgggtaattttttttttttatttgagacggggttttgtcgttttgcccaggctggaactcctgagctcaggtgatcgcccggctcagcctcccaaagtgctgggattacaggcgtgagccaccgcctctggcccggactcttgccctgcttccaaatgctagctaacctgtgagcctttcgcctgtcccctttgccatcctcagtggtgactcacttgtcttcccttatgtgcgtcaactttcctttgcattttcacttgtttatcctcacctgctctgcttttatctgctagcttaacattcctgactcgcacctgatgccagtacgccctcaccccgaccccgccaggtcaaagtttcttcgtccccagattcccgtgtgctctccagggggcgaggcctcgctggaagacgggaaagcggaatttcagtccaaccatgaagcacctggtagtttctgatacggaaagggcggcgccttatggagaagctgccaataaagagccgagatgaaaggggtggctgaaccaatgagtctaggagacaagatcgggggatgatctggaaagcgcgatcagtgaagcggacgaacggcaggataaggcgggtctagtgacaggaatgggccgatgaagctctgtagggatggtgggtaggccgatcgggccgtgtccccggcctcccgatccgacggaatttggaaatcccggggctattcatacattgagcttttaggagcggaggagaaaagccaccaccctgacgatcccggctctcgctccaccttcactcaggtggcccggcagcggaagtgacgaacgcggaagtggtttttctgttgccgaggggacgggccgggcagatgccaacatggcagcggttggggctggtggttccaccgcggcgcccgggccaggggcggtttccgcgggtgcattggagccggggaccgccagtgcgggtgagacagt

SEQ ID NO: 13216 - DNA, 1099 bp, Homo sapiens
gaaactgcaaaacagcttgtgaaatatcagccaaattacttccccgaactcctgttccatatatgctgtgcattgttaagtattttaagacctcttatattcgataaccccccttactatcctgtaaaacgctttataaacactttcctgggtgtcagatgcaaaatcttaccctcttcaagctgcagataaggacaccgagatgttgccaaatatgctgttttgtcccagagcacatactgaggaagtggtagaaccagaaccagtctgtgacccctttgttttacttttgcggaactcctggtctcattaaaggtgcaataccagcgatgagacactgcgtgtgcccaacagggacaaaggtcattgagcagtcctaggaattcagactttcagaaatgtctcagaagaactaagtagaaggcaggttgtgcaggtgtgcagtgcagcctcaaactggtaccaccgggatcggtttgcaaaacaggaaggtgcagtagggtgtgccgggacttagttaacctggcactcccccacctccttccccggcgccccgctgccaggttacttctggcccggtgcccttaacgtaccttttccgtgtttaacttggagggctacgttcccatcgcccttcttcctctacccgtcaccctacaggcctacctgacaaatgtggggacggtttagccaaggcccgttggcccacgaatgcccaggcgtgtgccttatttctgagagtgggagggagacagcccaggccctgcaaggacgcgcccggctaggggggcgcggtggcgcggtcgggagggtgttgtgttctcagcaggcctcagggcggcactctggttctgcggccggagtgctcgggcgggccgctgggcgccgacccatgctggctgggaacgtgtctcccggtgacgcagccccgggtggggaacgtggtgcggcggcggcggcggcggcgactgtacgcgcctccgccgcccccgagaggacgcgccgtgcagcggctgagtggcggcggcggcgacggcaaacccggagctgccggccggcgcgcgggaggaggacgcgggtgcggtctaggaagtaggtc

SEQ ID NO: 13217 - DNA, 1099 bp, Homo sapiens
aggaaagctagaggtccgtgtgtgccatggaatacgcttcggcaacaagaacaaacttttgatccatggaataacacggaccactctcaaacgcctgtgtgaagtgaaggaagctgggctcaaaaggtctcgaactctgtgattccatttacatggctctgcaaaatgcaaaccctcaggggaaagagtcagtcagggttgcaagggaatgcaggtgagaggtcaatgtccatgcagcacaaaggaagtttctggtggtgatgtgaacagtcttgactgctgatggctccacggctatattcgtttgtcaacactcacagaattgtgcacataaaaagggcacattttattgtacgactttaaaaaatagagcaaagaaaaaaacagggaaaaaagagaaaaaagaagagctaagcgtggcattctaagttccatcccctaaggtgaaatcaccaatatccacataaacagggctttgtagctcagctgaggttgactaagctttgggatccttcagggtctcctctttctatctgtgtgactctgggtacattacacacctattttaacttactcatctgtaaaattaggatgataatagcacctgccattggtagttgtcgagagaattaaatgagataatacatgaagagaggttagcccagtgccgggaatattttaagtttttaataaatgttctgtggtatttttattatcggcaagcaggctcagatccacagactgattttattcttacatgaaccttaagaggttgaaattaggactttcccccagttatgattcttagaagaatcttaattgagattcaggcagatgaagtgacttgcctgagggcaaacttcttagaagtggcaggtttgggtcttgaactttgattttgatgccacgtctcacaggttttctgttccactgtgacctcatgccctggagaggaacacaaatgtggggggcagacagcatgcaaatggaggcagcctgtagtccttacctggaaacttcacgggaaacctcacccagcctggacaaggacgggattgacagattgacagctctttctcgattctgtgggtggtggtgc

SEQ ID NO: 13218 - DNA, 1098 bp, Homo sapiens
gggcatgttaactttgaggtgattgtatggagaggagagcttatctttaggcagattagtataataggaggacttgaaagtatgatgaagaaataaatgtaatgcatgtattcattcctcaaacttttactgagtgtctaccatgtgtctggtacagttctaggttctcaagatgtagtaatgggcaaactctgccctcagaactaatactgtagatggagggaaaaaaataacatataaacaaatgaacaagataaattcaggtaataagaagactgggcaaggacaacaaaagagtagagaatttctttagatagggggtcaaaggaagacctgaggtggtaacatgtgacaaatcatatagagtatagtttttgccggccaaaagattttagagtcacagagtggccaatgagaattacaggaaataatattaaaggatctgttatgctttttgtcctttcaggggctattccatatgaaagacttggagagagagatccaagtataatgttaaaaggaacttgggcttggagacagtccacctcagacatttcagccatttgttagctgggcagaaaactcactttcttgaagtctgctcttatcactagaagaagaaggagtaacacctcatgggattaaattgtaatgattaagtgagagaatgaatttaaaacaactagcatagtgcttggaacaataacagtaatactgagtggatcataaaattcagtcatgtgaagtgcagttttatttaataatgtaatctaatgtcttctgatgtacagttttatttaaaagttgtactttgatcttttatcatgcaaagcactttaaaagcacaagactggagttcaaaaatatttatattattaaattatctactttagctacctggtgacatttagaaaatatgcttacatgcataatactcttaagatagattttattaacttttaaatattttcttcttacagatgtgtatatctcatgattgatatggagaaactagtcatgggccaaaggtcaagatacttctctgggaaatgttgctgctgatgctgctttacaaagtcatacaatgagtgtttggtt

SEQ ID NO: 13219 - DNA, 1097 bp, Homo sapiens
gagctgtctttctctggctgttcacaaagcatgttttgtgagtggaaaggaatgcgggagtcatgaatttctttctgagtctcttgcggaggaggaggagtggactgttaatttgtagaattgcctgacccagcctccagacccgtgtgtgtgtgtgtgtgtgtgtgtgtgtgtgtgtgtgtgtgtgtgtgtgtgtgtggagggggggctgccattctaacctctcaaggctggggaactagcaagtcactttccaagagaggccaggggactcctagggcaccaaatattgcatgcctgactgtagcaccagaagtcattgtgaccttttcccaacaatgacttcattttatggcctgccacctgctgccactcttgtcactgtctggccacctcagaccccacatgcgtcacgcttggctgagtgcactcatagtccagcaaactggccatgcacgtctgctcccagcttggtggtcacaccacagctgcccaccccccataccaggccaacttctggctgcacactccgaactggtgattggttaggggcatgggattttgtttgaagctgtgaagacagccacggtcacactgtggcagctctgtagcccttcatagtttagaggcctctgcccacttgctgtcttgtttgattcttgcaacacctttgggaggcaaatgatggggccaggggattgactgggcccattttactgatgaggaaactgaggcccagaggaggtaagtgacttgctcaggatgacagagcctagaagtagcaaaattgaaacctgaaccctggaactggagctcttgagggagatgaaccaacagccaaatcttctggagtggaggctttgttaggaattcctttcagggtggaccagaccaagtctgagtctctgagagtgtgttgaggtgagatgttggcttgttgcggggagcatctggttcccggactggatgagtccctcaactctcaaaaccattgccctctcctctcccctcacaccccccccgtacagatgagatgattgaggcacagagaggggccatgacttgcccagggtcacactgagctagagacggagctg

SEQ ID NO: 13220 - DNA, 1097 bp, Homo sapiens
agggagagtccctgaggaggggccggggtgcttccggcctgggtggccggaggaggaggcagggagagccctgcggctgaacagggcagcgccccccgcatccggagggacaggcccggccccgtctccagtcccgcctcccgcctcagccgcagaacctcggtggttccttcagctcctgaagcggtccgcaaacaggtcgagggcgctgacgaggccgttttctgggctaagcagcgacggcgctaggcgactccgcttgtccttcgtttccgctgtcagctcagcaggtgacttattcccagtgctgctcttctcacagacacaaaaccaacagttccggtctcttccgatagttctggcagagacggctgcggggagacacgggcggaggcgggtccgggcgggccccacgtcgcgcagcctcagcgtgttgcgcctcccgcggctgcggccagagacttccgcaaacctcggggcctcaatcgacagaacgtgtcacctcaggcccaggagagcagggtccggggcgcgtcctcagaagccggcagggcgggctcctcgctgagccgcagggcgagcccggcttgggcctcttcccgcgggaggaggccgccgcgttccttccccggttctccagccgaccccgccgcctccgtctcccacacgcagggaccctctcccgacaccggcctgcctggaacgtgccagaatcgtctccctaacccggcggccgtggatgagcaaacctgcacccgcggcagcctgaactgccgtttgtcgcgtagtcctcgagtctcggagcgcaggggtcccgagggcaccccgggccgccgtcctgcggcccccccacagtgtgccgggactcggggtctctcaccacgagcagacctcggcgctgctatccggactcctcgagccccttacaggccacatggccaggggcgaccctcccgtcacaactgtgactctgtgagctcacagggctggcctccacattcttgctggtggaagaccacaagcaacgggatgccttggaaagcatcgttctgcagcaggactgctcaaccggccaatcagaacacagggaaccatga

SEQ ID NO: 13221 - DNA, 1097 bp, Homo sapiens
aaaggaattcaggaatctgagcctgaggttacctcatttttccctgagccagatgatggtaagttgtgtccatctaaaagagtaggtttttgaaagaaggaggagggtgcaaggctccagggtacaacttgctctgaatgaatgaagtgtattttggagcagatatagcttctagacatttcccatctgtattactaatacgctcccgtttgactttctcccatagttgaaagtttgatgattacccccttcttgcctgttgtagcatttggacgaccattaccaaaattaactccacagtaagtatacattttttttctccccttccaggtaacctgcacatccttttcagacttcatggaagcctagatatgaggtggaaccaggtggcttagggatagccatgggtctttgacagaaatgaggctacctgggcaactagcttttgtaataagattcccaagccaataattaggagtattgctttttgagttagaaatagatgattccatcactttaatggtacacagttgctctggctttgaggcaggaaagacactccaaactagtcagggataggagtggtaagggacatagtgacttttttgtagttgctatcatgtccacactgaatcccttctagtcttgcaagttgatttcctcatccttttttgccaggaattttgagctaccctggttggatgagcgtagccgatgcagattggagatccagaagaagcaaacacctcaccggacgtgtaggaaatagctgtgctggcaagaaccctgtcttcagatagttgtagcatgccattcccgagagtggcagagacctgtatatgtgacctttgtcctcacatatgttatcactcgctgataataccctttcatacttccttgactttgttttcattactctgatttcacaaaaactctttcattcggctaattgtgagttatggagggtgattgggatttcttttcccttttttgggaaatgggctctcaagctaaagctataggatggcagattcagaagtttcaggggtctgtttctatacatttgcctatgttaaaggggtaaaagggctctcttc

SEQ ID NO: 13222 - DNA, 1096 bp, Homo sapiens
acggaggccgattaagaaaattagcattcattaacccggttcacgctccggccccggcggaggggaggggcgcgccgggcggcggcgctggcggtggccgggtgaccggcgggcgcaggtgccaccgcggcctgaattttactctctcgggccggcagctgcgccacttgcgcctcgtcgcgcgtctggggcagccgccaccggcttgccccagctttaggcaaatccttttgaaagaccctgagggagaagaaacgcctccctctgggtaggagaacctgtagcgtctgctgttcgtcgcgtgtccagttgctcagccgggagctccggcatcttcagggcgcttattccactctccgggttttggctgcagctctgaggggagcgagctagaaactgacagaacgcgaccctccccctccgcgcccaccggagcccgggctgagagggacctggggagctgcggcctggccggggcggcgcactcaggtggcctcgcttccctgcgggtcaccgcccgccactcgcacagctaggtcggcctgttgggatcgggagaggtgggcgcacgagttttagtgcgggagtccggggtgcgggcggagtcctattgtccccgtgcacccgggcggcagcacctccgggtccctctttaaaccgagcgtccggcgacctttctttgtgcttagggagtcgaaagcggcatcttctccgagagaagtcgcctactggggggtggcgctggggaggtaacaatgggcgcccattgtcctccgagggtccaacggtgacccccccccgcgcgcgcgcccggccaccggttggccccgggccagggcacaggtaccgcggctgggagggtcggccccgctgcccgcgccctccgccccgccccagtgagtccccgcgccgccggccccgccccgcgccgccccgccctccgcaggttcagtcctcgcgtccggccgccccgcgctcagtcgcgcgcaccttctctcgcggccgggggaccgcagcgcggggctagcccggagacccggccaccggcctggggcgccttcacgccgtctcggagcggataatgcggtgagcaggc

SEQ ID NO: 13223 - DNA, 1096 bp, Homo sapiens
tggcagtgggtattgatcttttccctttaaggcttggaggctagcaggcttatggatgggggcagtcctatttgtaaacccaaacatacaaacatacaaactatgtcaaaggcatagcatgggtactgtgaaaggagggtgaaaacacaaagttgacatcacctctgacctcaaggagtgctcagcagactgagagagacaagtacatattttcctgaaggagggcactggagtgatggcgtgtttagaatgtgcaagttgagcggtcactgagaggcagctcagcagagtgctctcgcaaggattgggcgggcaacttcccactgcgtgcgatgtatcttaggaaagccatttaaaataggagacggttactttccatcaagtccctggtatggtccatggaagcagggttgtcagtctcatttcagcattttagaggcttctcagggtttggaaatggaagaagagaagcagcaatatgtatgcattgcagagacacaggcgagccccaatttaggaggttaggaggtcagtgctaagggccttgttttctttgcttagagcatgagttgccatcttctctggacagagagtatttggttgcctaaaggtaaaatctaaattttgctctgggacaaattccaaaaaaaattagctttaatcaaatttacttttactttatctttctgaaccttcaaggtccaaaagcattggttaataattctgcttctaaacttaacattgcagcacagggcatgttctgcccccaaggcaaagaccataagctactgttgtctggaaaacatacaaatagatatctcagcaaaagctactcatatattcttgttcttttgggtaaatcattgtcagtgactgattttttttttatgaaaggataaaaacacgccctctattggggtcaggttttgtgctggtatttctcccacctactgtatcataggagcttagattcccagctgcttgctctcagctgcagttctctgatggcttgcacagggtggaccagcccccttcctctatgtgtgtgtctgctgctgacctgtggctttgccgaggcagggaagctactggtagt

SEQ ID NO: 13224 - DNA, 1096 bp, Homo sapiens
atccataaacgcacaactgaggttgttggatggggaatttaagaaatcccacctcctcctccctgggacctggccctgtttcccgtctcatggccacctgcagggtggctgaagtttccagaatgcgtacttcttgtgaaggttctgattgatattttgctttctggaccagtgtggctctaccatattttgggatgttatgtcttgttactgctgattgtttcaaactcgtttgcccaaagaggtcacattttaatcagaagaacaaaaatgctatttttttttttttttgggtgggcgtctatccagctgtcttggggatttccagcactgttcttggaaatgttggctctaagtcgataggtcatgctagttctctctctctttctctgtgctgttggggaagctgtctgcttgggtgagagtgttcttccaaaggatgtctttgggtgccctgggatggttaggtccctagagtgggacatgttctggaagaggagcccagtgaactttgccctgttcggtagctgcagtttatttcctcactcttgtccctatctttcagttggtcgtaggagttgcccaggaaggaagtttggataataataatgacatctggcatgtaaggtccaggccctgtctcagttgctttccgtgtagcatctgaattctcttacaaccagtacaggtagtgttttgttagctgcatctgggactgggtagctgatgccctgagtttaaatgctgatccagcgtctcccagctgagcggtggcgggacttgaatgagatcgcggttctgtctcattctcaaactgctgctcttatcactgtgaaggaacagctatttagatgggctggcctgagggcctcctctttcccagacggcacggacgcagtattctatcagggaatgtggggccagctgggcatctggtagcccagttggttcttcggataatgggctgctcagtgaaggaacctggtgctgtaaaagtgattccccctctccttccagtcttgggctaaaactggagctgttcactgtggttgtatctgcctgaaaggaaagggcagatgaaagctggaaggagcac

SEQ ID NO: 13225 - DNA, 1096 bp, Homo sapiens
atttttccctggtgtgtcattgtgccattgtgcttggattaggagtgatttccaggaatccttccctgcatcttctagcttctgggggctcttggcctttctggactttcatggatcgtgaccacaccactctaatttctgcctctgtcttcctgcacctcaccctctgtgtgttgtgacttctcttctctctgcagtgaggacaattgtcattggattcagggcctttccagatataccaagatgatctcatctcaaattcttttacttcattacatctgcaaagagcctttttccaaataagatcacgttcacaggatctagggatttctatatggacctgtctttctagggggccaacataaccccctatatggtatagatgaagaaagattatttgcaattgatgaatccaggtgatggatgctttcagatttgttatattatgggcaatttgagtgacgcaaagaggaaagcatatgcagatagggttcccggatttgtcagataaaatacaggacacccacctaaatgtgaatttcagataaacagtaaataatatttcagtataatctggtttcataccgtgtttggaacataggtataactaaaaaattattgattgtttgcctgaaattcacatttacatggatgtcttatattttatttggcaacccagtaagaaaagggtgccatcaacttgcccttcacagacatcccttcccagctatgctcacaatagagatttttcagttgccctagtccttgcatccaactcacaaaaaaaagcatctttaaaaagccagtttctgctgacttgaaaagagagcaaaatctaggtgaaatgtattgtttaaactaattgccaaccttgaaaaggaacatattaaccagtgtcttctgataagcagatcacttgcctcatgtcttagaatccagtaggtggccccttggccatgaaatgtgtgggagtgggttttccctaacttgacctttctcctttcagtgggagggaactattgaaaggaacaaagagcttataaatacattaagacctggaattcagttgcccagccacgacagtgacagagtttaa

SEQ ID NO: 13226 - DNA, 1095 bp, Homo sapiens
gccacatgagcagatagaaaaggcagttcacctattcatcggggcctttgactgcagaagaaaacactggggcactggctgtcaagttcgggagggaggtgactccaggataaacagagcagcgagcagccctggctgcagacagagaggggctggctcccaggccctattttccttccctctctctctcccttcctggggcattgtggagtgcgtaatgtgaaacggaaaatgtcatgatttccactgggaacgtgtccacggttttgagaaagctccagaaactcaggtccataaagcactgaggggaggaggaagggagggaggagaatgggcggtcacagtgccctctggtcaccaaggtgaacccagcgagcaggagccagtacgtggctgtggcccaagcctctgcctgctgctggagcatggccaggccgtcgtcgtagggttgcaggctgttcgggggtcctgggtcccacggagccctgggacctgagggacagggatgttcccttttcccccttggaggtgtagccagtagtttggctttacagggggactctgtgaagagtccagttccctatttttaatcaggttcatttttcacctgcttagaaagtggaacatctcctgaaaggtgacaagtcgtgatcaaaggcaagtctccaggcagagagttggcaggtttccgaagcaaaggttacttagaagtggaggctccactgccagcttccccccgctgcaaaatctgacactcctcaccctcagggttcagcaagattctcggaaaggccttttctgattctaggaggtgctgcagcaggagctgactcggccatttcctggcctctttagttggaagatgacagaaaggcggaagcagggactgctattgtgaggcccatggcagccttcctgtaaaacaaattggcaaattgtcaccttcagatggaccacagctggccctctgaacagccctccttggcctttccagagtgtacatgattgtgtcccatgtccagggagaggacagagccaccaggagggtcaaggtcgtggagggaaacatgggtgagtaagagatggaccccagaa

SEQ ID NO: 13227 - DNA, 1095 bp, Homo sapiens
tcgagattaatgtttctggaatgtgaagtgacttaaaaaaaaattaatcacttcctggctcggtgcggttgcctgtaatcctggcactttgggaggccgagatggaggatcgcttgaacccaggagttccagactaggctgggcaacatggtgagacctcctctctacaaaataaaaataagccaagcatggtcgcgcgcgcctgtagttccagctactcggaggctgaggtgggaagatcccttggagttccagactgcagtgagccgttattgcgccactgcactcaggcctaggcgacagagcgaaaccctgtcccccacgcccaaaaaatcgtatttcctgagggaacagttccaactaaacatcccactttgtgcgtaactttacattcaatccatcatcacctcaagaacaaaatgttctttctccgcctcaaacatggaggacagaaaaacagaagttctctcaaacccaccaagcacgctgttttcctgagacggaaaagaaggataacagccgctacggcgcacagcctgtaggggaggacggcaaccaggaaaggccaaacttagccgcagtagtgccggggcgtgctcgcggcccacggcgtcccacgtcgtcccacgtcagccttgtcccggcagagcttcacgagaggaaaggcgggattcagggtgggcgcgtgccctacgaagacgaaacgaactttgaagacaactagaggagctcgccccctgcctgtgacagcttagggtcgcctactttttgtggacacactgccgtccacggagtgcagaggccgcctgcagttttcttgcgtccctgtgagacgcacggtggcgcaattcccgagcgtgccaatcccgggctggctggagggcgggctcttcaaatttgaattgcggaagtgttttgtgtgttagagaacgtcgcggaggaggtaagcgtcgcttggcgcctggccgccgcgggcaggatacaccgtgggcctgaggcgcgagcccggcggcgtgcggccctctctccgcgcggagccgagccggaactgcggcagtctctccctgccaggctcttcatccaaggtacgtcctc

SEQ ID NO: 13228 - DNA, 1095 bp, Homo sapiens
gcactctagctcctgacctttgacccgagggccacctcaaccccagcttctgacgtgtccaggacagagcatccctggattctgttcagggtgggaagtagtactgctagtcatggtctcaccccgagctgacccctctgcctgggctttgtgccaccctctcccttgccaaagaagaaactctccccccaaatcctccaacctctggggccacagccctgcccctccagttccttggcagttctcccccaaaccaggtctgtacaggtgttctttattttacatgagggctactttccaaccaaataaagtcaatttttctaagaatgagtctacatgtaactttacttccatattcgaattggaaatctgcccccctgtggggactggggtgagtgctcttggccagagggtgggtggcagacccttcgtgcagcccgttggcctgggctctgtacccgagctccaagcctgccaggatggtgggggatgacccatggctaatgagggctccgactcatgtccacctctccccagctctttgaaggctaatggtgatctcctaccccattcccggggggcacacaatgagaaacttccactttgtagatggggaaatgcactttgcacggaaaggtggtggggacagtcctggagactgggctggtaggacagggcagctggtggggaagggtgcaggttgaggtctgccctgggaaggccctggggaaaacacttctctccttcactcctcattccagcctcacctccacctcctggatccaaggcagggacatgtccctgtgactccattcaggctgcacgggaaatctgacctgctcccatcagcctctgacttccaaccccagcccagcatccccacagcatccccagacttcctctgtgggatgcggaggagggccaatgggaggagcttctctccaggttggaattcctcagtagaatgcagacggctggaggtcacagaggcctctgtgatatcaccacgagggggagtgagaccacttggagtgaagattctttgaggagaaggaagagactgagcaaacatgagggataatgaaaaggcctggt

SEQ ID NO: 13229 - DNA, 1094 bp, Homo sapiens
tggaaaggactctgtgtactgggggaggctgtgtgtcttaggggggctgtgtcctgggggggtttctgtgtcccgggggggctgtgtgtcctgggagtgctgtgtcctgggggacctctgtgtcctgggggcactgtgtgtcctggggggacctctgtgtcctggagactgcgtgtcttgggggtcctctgtgtcctggggggtctctgtcctggggactgtgtgtcttgggcaccctctgcgtcctgcaggagctgcgtgtcctgggggggctgagtgacttgggggccctctgtgtcctgggggtctctgtctcctgaagggggaccctagtattgtggcgcttctgggcttgcctctcatgagggatgatgcaccgggcctcagttttgggtcagcctcctttaccggctctccccccttcctccgaccgtcaggtatccgtgccaagccctcaacgggccatcctccttcccgcggcgaccccgcgcatgacaaggccagaccctcccgcgaacgtgctctgcgctcccgcctggcccctccccgccccgcccctccccctcctccccgccccgcctcgctccgcccctccccgcctccgccccgccccgcccgccctgcctctccccgcctttcctcgcctcgccccgccccgccccgccccctcctccccgccccgcctcgctccgcctctccccgcctcatcccgccccgcccgccctgcctctccccgcctcatcccgccccgcccgccctgcctctccccgcctttcctcgcctcgcctcgcctcgccccgccccgcccctccccgccctgcctcgcctcgtctcgcctcgcttcggttagatgcgctcggcgctccataggctccctggtggggcgcgggcgcgcgcacggacgtccagcacgcacgcacgcacgtccagcacacacgcacatccagcacgcacgcacgtacgtccggcacttccggccgcggcggcctcagcgccggcccgaagggaccaggccgccgtccccagcgagaggcatgcagcgctgaggagcggcgacccagcacggcggcgccatgaacctcctgccgtgtaac

SEQ ID NO: 13230 - DNA, 1094 bp, Homo sapiens
tggcacatgtatgttttctgacctacacatttttaccaagtgggctgtaattttgttgaaatgacttgaaaactctacaggtgactgacccttgttgtttgggaaagtggtaggtgcagggtgatggggggtgggtgtgggggctgacctgggctggaaggatgggtctggggatatgatatgatgggagggggtatggaagcagctctgaggggaaagcagcacagatcaagtgtgtggacagggaagagctgacatcctgagttccatggcaaccagatttgccaaggtcttagagtgtgtccagagtggagcctgaccacagacctcagctcaagggacccagagcccctctgagtcagctgtactgaattacagccccaaatctgggtcaactggggagagacgacgaggattagggttccaaggtgaaactgtgccattgcgctccagcctgggcaacaagaatgaaactctcttaaaataaaataaaataaaataaaataaaataaaataaaatagcctaaggatgcatttctcagaacttatccctgttgttcaatgatgtgtgtctatacagtggggccataactaagacgtatgttgcccaagctggcaagatagctctgaccttctcttgggcccctcatttcccccaaacacaggttgtctgcagtcttgaccaatggctgccagggcatggactccgctgcaggggccagtgggaggccccagctcaggcaaaagcacaggcagatatttcaggagtctgctagggctggcactgagggcagagacagaggggtctccctgtcctttggagaacctcacgctgcagaaattccagactgaaccttcataccgagtaggggaggagctgtctgcgggtttgagcctgcagcaggaggaaggacgtgaacattttatcagcttctggtatggccttgagctggtagttataatcttggccctggtggcccagggctacagtcatcctagcagtccccgctgaagtggagcaggtacagtcacagctgtggggacagcatgctggccaagggtcttcccccacgctcagtcctggtcaaaggctg

SEQ ID NO: 13231 - DNA, 1094 bp, Homo sapiens
aacatagcccatttgaatgttggaaaagaactgtcagaaatacaagttcttattttgtactttggtaacatgaattttacacttagttgaacatgaagaatcaaaaaagctctggattgttgtaataattgtttagaattttagatgtaccatttgacctttgactttaagatgaatttcagtgtcctcagtaaataaaggcttacccccaaccttaaatagtgacgcacaaaggctattattaccaccactgagtggcttaaataatcctgtcaacagcaatcgcccatttccaaagccatggtgaaacatctctgtgctaatttcttttgttttgtttcctaattttttttttttggcaggtggtgggaaataatctttgtcttctttggagtaaaccttcaacaccggattttttcttttaattatggatgtaaaccccaatatccccataatttacattgggtctcgaccaattgcctaattataagaggatatatttaggctcttatttcatccacacaaaaacttgtgtaacaggtagttggaaacatctgaggcaccactttgattctgttttggatggtcatgttttttctcctccgtttccccagcatgtctgccaccatcctcatgcactgcttccaagtgcctgggagcctttatgagcgtccctaaacctaaaagaatccagaggcggggctcggatgaaccctcgagataagcaagtgagccgcttctcccctctaaaggatgtttacacgtgggtggcactcgctggaatccagcgctcgggcagccctgggaggacgcgctcagctgcgaggaggtgaccggcggcggcgcgggcagtccggaggggcgggacggggcggggcaaggcgggggccgggccggaggaggcgggctcccgggatccgcggtgtccggcagtagagctcgctgcagatccgggctctgaccatgatttggcgccgcgcggcgctggcggggacgcggctggtttggagcaggagcggctcggcaggctggcttgacagggcggcgggagctgcgggagctgcggcagctgcggcctctgggtacggggtcag

SEQ ID NO: 13232 - DNA, 1093 bp, Homo sapiens
attcacctcactctcttctccccaaccctgcaggtaacatcatgtctcgggtaacagaggacacgtccaccctgagtgattctctgagtgagaatctgagcttatttctgtggtacctggtgcgaggcctatgtctcttggggatcatgctctggggatcagtgtccctcaccatggtcaccctgatcaccctgcctctgcttttccttctgcccaagaaggtgggaaaatggtaccaggtatgttcatggagttggcccgctctacacagaccctcatctcccagacttggcagactcagttcctctcacattgctttcagtccagctttcctggcacccttactgattctccatcttcatggaacaccctgtccctgtggtccatgttcccaggttgctcaacattaacctccatactctctgggtcttcttttctagcttctccccacaatctgtctttaagaatttgatccccaacccgttctgagtcattttcctcttcctcgtatttctttagcatccaaggggcatagctgtgtctctttctcttttctccttttcctctgtctcttctcacctttaatttccaaataggtaactcaggtattagtgtccctgatggtttgccaacccgtgtgacatctcttgtccatgtatccacagttgctggaagtgcaggtgcgggaatctctggcaaagtccagccaggtggccattgaggctctgtcggccatgcctacagttcgaagctttgccaacgaggagggcgaagcccagaagtttagggaaaagctgcaagaaataaagacactcaaccagaaggaggctgtggcctatgcagtcaactcctggaccactagtgtgagcacctgaagatgaatacccattcccttgtccttaagatgccgtgactccattcccattcctatgaccctgctcccactcctcctttactgggaaatggttggttcagtattttcgtcctagcaacctgaggctcaatgactctactcagtgtccctagccccctccctctctttaaagatgctaggtggcttcctttcagtatggtacataaaatccacccaacc

SEQ ID NO: 13233 - DNA, 1093 bp, Homo sapiens
aaagaagaatttctgggctttccgttttttcatgtgtgtttttggttttgtttttttgttgttgttttttttgtttgtttttgagacaggatcttgctcagttgcccaggctagagtgcagcggcgtgatcatggctcactatagctttgacctcccagtcacaggtgatcctccctcttcagcctcccaagtagctgggaccatacgtgtgcatcaccacactcagctaatttttatagagacaaagactccctatgttgcccaagctggtcttgaactcctggcctcaagtgatgctctctccttggcctcccaaagtgctgggattacaggtgtcagccaccgcataggctttacttctaacttcttcttggctgtagtccaggagtcttgtttcctgagtcctcatgatccccatcacatgcttccaggttgattcactctttgtacaaccctctgacccagcgctctccacagctctgccctcaactcaccacatatggtgcttgaagagccacttcctttcctatacaggccaccaatgtctttttgtggcacatgaaacccacttcagagaaatgtgggactttggaatccacgaaaggcataattcacttcactgtcaagggatatagctcattggtcagaaactgtatctgttctctgaaggaccattgcattcggtccctcctggctggtttctggtaccttctagtctgtccttctcccctccttgtctgtcttcatttctctcaaatcccccctccacctgggcaaatctctttaaagaccctgtctttgcactcagagaacgccccatgctccacctcaaattctcccctcatttctggccctgcatccctcattctcacactctacctaggctagcactcactggtggagggctggggtgccacagctttggagaagaggtttaaaggtctccatatccaggagctggctctgatatctcgccccacctgcctgaggctgatcattaacccagaacttatataaagatggctcatgcgtggaatgggtatagcactgcctgcagccatggccagtacggttagccccagcaccatagct

SEQ ID NO: 13234 - DNA, 1092 bp, Homo sapiens
tagggatcaaggtccttccaaacctgggccaccccaacctcggagaggctccccactgagcacccaaagcacctgtgaccccataccctgccggtgccctccccccacccatgcagccccatgcccgcccttctccccgtggacctgccaccccgacacctggacagaagccggctctggtccctcatctccttctctccttggccttgtggttcaggcccttgtgtcctgtcccctccctgctctgtgagtgtctggtcactgtggcagccatagggtagcacctagaatctgtgttggacaccggtgcgtcacctgttgcttcccgggcaggggaagcacctggcctgtgttccccccctctgccctccaccccttgcccacaggaggtgctgcaaagcctgcgtggcgttggcggggtgctggggtctggaggagcccagccagtcggttgtgttggcaagagacgggcctgaacaagagccaagtggcttctgcgtcagcttttaaaaccaccaaaaggagctcacttgtcatgctgtggtccaaatattttggccatttagatgcaaccttctgtgcctctgaaattaggtgtattattaatctcatccagcccagtgacagagtgggcagatcagacaaggatccttgcagcgggatgaagggtgagcatgttcttatcggtgcaaagctgacacggggtgtttccagaatgacactgatggagtgcagcctgcctgggggaggggtggctgggaacccccggtgatgaggagggcatgggcacagggcttgcttagggaggagaagagagggctccagagacacggttgctggcttccagggtgtcacatggggtgacgtggcagggggtttctgcaggggtgcttctgagatagggcgatagggccagctggggttggctgcaggctccaggagttaggttccagatggatttcagatgggactttcttgctaaccctactttttttctgattataaaagtaataaagactccttgtagagaaggaggcaaaatacaaagaagagtgtgaagcccccatcactccattaatgttcaccagtcgg

SEQ ID NO: 13235 - DNA, 1092 bp, Homo sapiens
agcacacctcacctcctactcacccacctcctgctaaggatccctcctgagcagccctgccatctgcccccttccccatccccagggccaccacttggccctgtccctggctctgccttcccctcctacctcccctgcaactctgatccctggtcagattgaaccttctgaattggatcatgccgcttctctgtataaaactcattttctgtggcctttaggatgcaacttagcttttggcctggttcacggtgcactttgaggccggtccccacctgaattctccagcaggggtttctgcctgcctctcaccccttctgctgtgtcacactgatggtgctatgccttctccccgcagacggttccctgcagctcaggaccttcgcacagctatcgcccccaggcctgccctccctgcctccccatcttcccctcccttagaagggcagtggcttcctgctctcaccggcagccccagcttccccattgcagccccaggcccccatgttgtccctgtctgctcgtgggtctgaccactcctccagggcaagggctggctctgagtcccctggtccagggcctggcacagaactggcactggtgagggagcgaatgcacgaaggacaggagcaggggtgacctgcaggggacccggggaaagggagtggaaggtggctgtgccgctgggtctgcagtgcttccctggagagggagcctaggtctgagaagcaaggttagctgcactgctgtggctaggatgtggcactgccattgctagggggtggcaccacagggcaaagggcattgtccttggagtcagacaggactaggttgaatcctgtctccactacctacctaccggtgactctggaaaagtcacggcacctttttgagccccatttcctcatctgtaaaaagaggaccaataaacaaagggaggggccaataacagccagcctcccaccctacaggctgggcatcagcaaatgctcacagatgtctgctctgcgcccatccacaggcagagaggggcagaccccgtccaggctgcaaggtgcttctagcctggtggggcagacgatgcagcatgag

SEQ ID NO: 13236 - DNA, 1091 bp, Homo sapiens
tgagatgccacacatcctgatactatctctgttggatccactctccttctgtggtgattataccagtggatctcaaagtgggctgggcagtagaatcatttgggtgatttaaaaaggtgtagattttttagtattgatgacaggactcctgcatcaggatccctatgggatgagctttgcaggagatcctgaagcagtgtcccagcagctgattattggtcaaaatatggacattaggaactgataaactgctcaggctcacagcttgactaagcaggcttcaaatttggaccttctgtttatcagctgtgggacactggcagtgaatttgaaattctttaaaatacaatctgtcttatctgtaaaatagagtaaacaaggtgttgatgtgatgattaagtttaatagcctgcatactacttgcttggcacattgaaggcactgtatatgtgcagctaaaacaataatcatcatctttgtctaaaatatacaaatatttgaagctgtatttgacagaataatcataacaacattatgatgataatatcagtctgaatcacggacaatatatagaccaaatactgagttttgctactatttgaacctccttttctatgtttagttctcaaaagtctatggccctgtgttcactgtgtattttggcctgaagcccattgtggtgttgcatggatatgaagcagtgaaggaggccctgattgatcatggagaggagttttctggaagaggaagttttccagtggctgaaaaagttaacaaaggacttggtaaatgtgcatgtatcgtgtgtatgtgtacatgtgtatgtactgggcagtggctatagggatggggaggatggaaaacaggcttgaagagctcctgggacagaacttgacctgtccacgtggctgccgagtgtcagctctcttgtccttgtttggattctccctcgtagcttctgttttctgttctgctaggaatccttttcagcaatggaaagagatggaaggagatccggcgtttctgcctcatgactctgcggaattttgggatggggaagaggagcatcgaggaccgtgttcaagaggaag

SEQ ID NO: 13237 - DNA, 1091 bp, Homo sapiens
aggccgtctagaaaaacagaacctgcctctgcttctgctcagggtgtccccgctgggtttccattgtcctttctccattgctccctcctgtgacagccatcttgctcatgtaccagccctcatcaccccatccccataaatgggtgtcctcgaggcctctgcctgggggtcagaggtcaccacagggtggccattggcatgtcaacccgctgttaattcagagaagtgggctccacctcattgggagaagtgccatttcagcagaaattcacacgttagacgtgtgttgctgttaagtaaggggaagagagaggactagcctcagagctctggccatggaaatgacctcctaagactttttcgtggttttaaatattttacctctttccaggtggcatctgagtacatcagatggttttgcaaaatgcaaacaattttttccttggggatgatttttggggagagggggctactgtaaaaaataaaaccaaaaccccctttgctccctcggaggttgaagttgccggggggtgtggccggggtcatgcatgaggcgacagctctgcaggtgcgggtctgggctcatctgaactgtttggtttcattccagttcctgttcaacagcaacacatagcctgaccctcctccactccacctccacccactgtccgcctctgcccgcagagcccacgcccgactagcaggcatgccgcggtaggtaagggccgccggaccgcgtagagagccgggccccggacggacgttggttctgcactaaaacccatcttccccggatgtgtgtctcacccctcatccttttactttttgccccttccactttgagtaccaaatccacaagccattttttgaggagagtgaaagagagtaccatgctggcggcgcagagggaaggggcctacacccgtcttggggctcgccccacccagggctccctcctggagcatcccaggcgggcggcacgccaacagccccccccttgaatctgcagggagcaactctccactccatatttatttaaacaattttttccccaaaggcatccatagtgcactagcattttcttgaaccaa

SEQ ID NO: 13238 - DNA, 1090 bp, Homo sapiens
aaattaagaagcactggcccatcaattgcatttcagagcacagagtggaagaaggttagcacagactggcatgtggcttcacatctactagttgttacaccttaggaggattatttaacctctctgtgcttcagtttccccaactataaaatagaaatgacatgatagcacccaactcctagggctgttgagaggcccaaatgaggtgatacaaataacatttttgaagtgggccaggcacccaaccaagtcttgaccaatgttgcctattattattcattgctgaaggctggagtgagaggcatttagggaaaagtaagctcaggcaaaggagaaaaaataagaacattgtaggaaaaatggaaagattcacaagaagggagaggaagaggcagcacaaatatattggaggagctccacatgcttatttgactcaagacctgttcatttgaacctttagaaaatcgttcatctttgcttatacagagcttcatctggtgtgtccatgccagggtgcaagagttgtctgtgcactcagacttttgagcaaggctgtttcaaatgttcttttagggtatttgtctccacaaaactctatagctgggccaggagcatctggatcctgcaaccagggattttccaagagcaatcttttatattgagggggaaagtttaaaggtattttttttttttgtcttgttatgtttttaagtaacttttcacaactacaggcctgtaaaaaataagggttgggatagcctgaattccagggctcttgctgggcccactctgctcaatttgcctctcgttccaaggtgaatcagcaatttccaaggcctgttgacaccctcagagggtttcccaagcacactctgtgtttggggttattgctctgagtatgtttctcgtatgtcactgaactgtgcttgggctgcccttagggacattgatccttaggcaaatagataatgttcttgaaaaagtttgaattctgttcagtgctttagaatgatgaaaaccgaggttggaaaaggttgtgaaaccttttaactctccacagtggagtccattatttcctctggcttcctca

SEQ ID NO: 13239 - DNA, 1090 bp, Homo sapiens
taggggcaagtgcaactgtttatgcggagaccacttttccgtgcagcccaactgaaggtgcacgttccaccgcaacctggtgcttacaacagctcgggaggccgcgctaccgcgcctgcgcccctctgaatatggaagcgcgcgcgaggtccttaagggaaaaggaagtaagggcggggacggagggagacgacttcaacgtagggagttgctgctgctacactgccggccggagaggacaaggaaaacgtggaggaagtcggtgatgactggctgaaggggatgattggcgggtgaaaagagccgggccagaaagcacctttgcatgtggctagaaacccgcctgaagaggggctgaaacccacgccggaacccgcccgattcgagccaatcagggagaggagccgggtgggggggcggacggggcggcctcgcggggggtggacggggcggtctgcggggagggggggcggtctgcggggagggggacggggcggcctcgcgggagggaggacagtttcgcgggttcgggcggcgagtctcccggatgctcctcagctctggggacgcggtgcagaagtgtgagggcgcccggcttccaggcagtaatgggcgggtccctgcgcgggagcgtggcgggcgctggactctacagcagatgtggaactggagagcttggcgcgccttccgactttgtcacacacctgcgccgccagactggggtcgggcccctccgcgttctgctctggagtgcctgggtctgggcccagcaccgcgcttttagaatctcctcagctgaatctgacgctcagcagtgggtgaagcgcagccccctgtttcaggccctgccgagctggaaggagtgtcagagctggagcgcgcgtggccccctctgtgttggggtcaccccggggttgccagggctcagggagggtcgtagtctggattttgtcacccgcacgtccccaccccccagcaggtctggggttggagaatccacgcgggcttcataagctagatgccagttaactgtcgagaggggacgctccctcctcgtaggcgtccacactggagaaggaataagatgggc

SEQ ID NO: 13240 - DNA, 1090 bp, Homo sapiens
cgtgacctgaggttatgtttggtatgaaaaggtcacattttatattcagttttctgaagttttggttgcataaccaacctgtggaaggcatgaacacccatgtgcgccctaaccaaaggtttttctgaatcatccttcacatgagaattcctaatgggaccaagtacagtactgtggtccaacataaacacacaagtcaggctgagagaatctcagaaggttgtggaagggtctatctactttgggagcattttgcagaggaagaaactgaggtcctggcaggttgcattctcctgatggcaaaatgcagctcttcctatatgtataccctgaatctccgcccccttcccctcagatgccccctgtcagttcccccagctgctaaatatagctgtctgtggctggctgcgtatgcaaccgcacaccccattctatctgccctatctcggttacagtgtagtcctccccagggtcatcctatgtacacactacgtatttctagccaacgaggagggggaatcaaacagaaagagagacaaacagagatatatcggagtctggcacggggcacataaggcagcacattagagaaagccggcccctggatccgtctttcgcgtttattttaagcccagtcttccctgggccacctttagcagatcctcgtgcgcccccgccccctggccgtgaaactcagcctctatccagcagcgacgacaagtaaagtaaagttcagggaagctgctctttgggatcgctccaaatcgagttgtgcctggagtgatgtttaagccaatgtcagggcaaggcaacagtccctggccgtcctccagcacctttgtaatgcatatgagctcgggagaccagtacttaaagttggaggcccgggagcccaggagctggcggagggcgttcgtcctgggactgcacttgctcccgtcgggtcgcccggcttcaccggacccgcaggctcccggggcagggccggggccagagctcgcgtgtcggcgggacatgcgctgcgtcgcctctaacctcgggctgtgctctttttccaggtggcccgccggtttctgagccttctgccctg

SEQ ID NO: 13241 - DNA, 1089 bp, Homo sapiens
tgcacactgaaggctcctaatttttaaggtcagttgtttctcttagtgaccaaaataaaaaccaaatgagtttccccatacttggtctacctcagtgtggattctctgttctcagtgtctgaagtccttagctttcagttacttgagtttagtcaagaatttgttgaaagcagttatcctgtgtgtgctctcatccttctttcagtcagcagttctctacttttggtgcagttcacatacctgctctttttgatgttgtcacaaatacttcgtctgggtttactgctcacttggcatttgtttggttctcgtgaccaggaaagtgtaaaagaaccatgacaaccatatttactttttttctgggtttgaccttgatttcagcgtggagctagctgtccctgataccttggcataaaagggaaagtctttcattgtaatttgccagttaaaagtttccagaataaggttactcaatgggcttgcagaagcctgaggggaaactctgactagttgagctgacacagtcaacgctttctccatacaggcctgcagagatttcctcatgttagcccagacccatagtaaaaaatggcaaaagtcactacagtatgaaagagaccagcgtatccgactggaagaaaccctcgagcagctggcgaagcagcataatcacctggagagggccttccgaggagccacggtgctgccggcaaacactcctggcaatgtgggttctggtaaaggtaagacacttagctctcaggtagcctggtctaaggtgagccagatggttttctgcagttgataggagaactccaaactcttcacagtcaatgagtcatgtgaaatggaattggaacccattgatttattctggattttccactgctttctaccattttttgctgtgtttgtggttagtatttaaaagaacttgctatatcagacatttggtaaagataaccaaagtcaacaaatggggcttttcttcttgtagatcagtgctgctctggcaaaggggacatgagcgatgaagatgatgagaatgaattttttgatgcacctgagatcatcaccatgcctgaaaat

SEQ ID NO: 13242 - DNA, 1089 bp, Homo sapiens
ctaatgtgaccccaggaaatcagagttctaggaagaaaaactaaggcgctcggcaccagccttccccaccagccggggccgccttccccagcgccgcgagggcgcggccggcgggaccagttcccgaggcaggcaggcactcgggtgcaacctgaggaatctgggggcgtggaaggcgcgcgggggagggcaggcttccaagagtgggaccctcgcgtctcctgccgactgggtaggaaacgggggcttcccccttgccctctcagagcgggcgatcccaaagagacaggttaagccgcaggttgagagggcagctccgcgccggtgccccgcggatcctgcaggctcccgggtcccaggagaagggcgggctgggctgggctggggtggggagggcggtgaatgcaaggatattgccgcaggcaggagtccacctcgccctcgtcgggcccggcctggccgtcgcccccatcttcttcgtccacgaacttgttctcgtcatattcatccacgtccaccttccggaagcgggccgacgacactgtgttcttcgacatcccaatcccgaccagcggcaaaggcctcttcttggcgctgcctctacctcagcaagcccagcccagcaacccactacccggcgcctgattcacttccctcttccgctctgaggcgtcgccgactgccgcggctcggaccgttctgggcctgcgcgctagccccgtttcttcctcctcaggttcgcgctcccttggcgcctcccacgctgcccctgctcttccacggagagcgcgcgcgagggaaggagcgcgcaggacacagcgcgcaggcgcgggctctccgcaggcaaggggcggggctgggcgaaggaggcgggggcgagagggagggccaaaagctggaccgcgggcagaggtaagaagcgattggtcgtccgattgcgtcacgtgattctcggtgggggggttcccatagaaacgcttttctgcggtccagtctagggggtctcagattggcggggatgggcagcagcggcaggtggccttggcttttgctgcagccgtcaacgacctatcatcggggtcctgcgta

SEQ ID NO: 13243 - DNA, 1089 bp, Homo sapiens
gatggtgtgtgagtatggaaaaggcctttctcggccagacttggtggctcacgcctgtaatcccagcactttgggaggtcgaggccagtggatcgcctgaggtcaggagttcgagaccagcctggccaacgtagcgaaaccccatctctactaaaaatacaaaaaattagcagggcgtggtggcaggcacctgtaatcccagctactcaggaggctaaggcaggagaatcgcttggaccggcgaggtggagattgcagtgagccaagatagcgcaattgcattccagcctgatcaacaagagcaaaactccatctccatctcaaaaaaaaaaaaaaaaaagaaaagactcttctcagcgccgcacagtggcttacacttacagtcccagcacattgggaggctgaggctggtggatcacttgagtccaggagtttgagaccagcctgggcaacatggcctagccccgtctctaccaaaaatacaaaaattagctgggcgaggtggtgagtgcgcctgtggtcccagctactctggaggctgaggtgggaggaccagttgagcccaggagttgaggctgcagggagccgagatgacagcacggtactccagcctgggagacggagggtggccttgtctcagaaggggaaaaaggctgaggtttttttccctcttcttttggttgtcacttttagcaaagtaagattgttattcctttcggttcattgatatttaaaagtttacatgtcacatttttatttcagcaaagagaaaatatgatttttaaatgaataaaaaacatttctgtgcagtagaagtcgtgctaacatctcatgttaaaaagataaacaacaggattaactgtttactttgggagcgcagaggctggttgttttttgagaagaagaacacaatgtcctgctgtctctggtttcccggtcggccctcctcccaggcggctacaggagtgggcgaggcccccgcccccaatgcgtccccgcccccaccccgccccgccctcgctctggcccttctcgcccccgccttttctcagcggctcccttgcgctcaggttccagccctcttctgtc

SEQ ID NO: 13244 - DNA, 1089 bp, Homo sapiens
tgtcaagcattttgtgttcgttttttaggcatagagagtgcattggggattttcgatgaggggagtgcctagcaagttgctgggtacatagtaggctgataatcaatcaatgatggttcaactaatgaaggagagaaataataattgccacaaattattgggtgattgctatctgccacacacttttctaaacattttcactactcatgtaattctcaccacagcccatgagatggtttctccatatccattctacagatgaggaaactgagactcagagaggctaagtgtcttgctcaaggctgtgactaaagagtgggcatctaaccagagcctgtgcttccacactgctgtgcaatttggaaaacagaagaaggggagagaagaaaaaggggttgtgggaccaatgtcatccagaaaggaagctatgataggcccaaagtaggagaagaacaatgtgggttggaaataagagacattccaaagatgcaatcaacccaaatctgttattatttgatatgggtggctgggcagagggaagggtcaaaaaggctcccagcttctagttcagtcccggggaagtgatagagctattcaaagaagttgtagtgagagagagggaagatgacagtttggttttagttgatgtgtacagaaatacgggtgcccaggagcccacaaaacggccagaggagaaatgctttcaaaggcaagctgcagggctccttggttttgtcacattcctcattctggggctttgcggttttgtcttgggaatctcgaggctctcccaaggttcctttctatgtttatatcatttagcagggaaggattgttaatgactaatctgtgtccatgaggcacagagccaaggaagagatgctgctgctagcccagaaggccgcctgtgatcatgcacagtacactggaactctctcctcctcctcacctcattgtctccccgacttatcctaatgcgaaattggattctgagcatttgtagcaaaatcgctgggatctggagaggaagactcagtccagaatcctcccagggccttgaaagtccatctctgacccaaaacaatccaa

SEQ ID NO: 13245 - DNA, 1089 bp, Homo sapiens
gtgtgcaaaaatttcctggtttccaacgtagtcttcgtgggtgagtttacaacctccacaagccctgtgctccccgcacaaacacctgaaatgctttgacagagctgtttaaaaacagccacatgtgtctgtgaatgatgcccaaccacatgctcccccgacttgagaggatcaaggctacagcccaggtcagaccccggatctttaggacctaaattcccccatccctgcagtggataaccccgtgtaaagatgccaaaggcgggctgcccccggcgcagcctttcctggacatgtgttcccagctgcctttgctggagcgccgctgatccttcagcacctctgagaggcaatgttctgggctggaccagggggccttagagggcagaggtcaaggagaaccccggagtctggggaccggccaaggcttggcgttaacctttgtggatgaaaagtcccgctgggctgatcctgcgcggaccgggcctggaccctggggcgtgaggagggcgcggtgcgtcccgtggttgtgcttggaagccccccgagggtgcgcgcgcgtgggtatgagtgcgtgcgtgtgcctgggtgtgcgtgtgtgtaagtgtgcacgtgtgtgtgtgagagtgcgcgcggggaaggaggcacagagacagcccggacaggccactgcgcagccctggtggcccccgctccacctctcgctccgcagacccgcgccagggaggcctctgggccgcagcgggcaccggagcggagcgggcgcggcagcgggcgctgggaggtggggctgggggaggagagggggagggagagaggcgggcgggaggggaggatccgggaagctccggggtatttgacaggagcgagggcggacgcaaagaacgcggaggacctctgggtgcctgcaggggagctgctccagccgggccgccgggagcggtggggagagcatcgcggagccgcccctccacgcgcccgcccagccgcgctcgcccactgggctctcccggctgcagtgccagggcgcaggacgcggccgatctcccgctcccgccacctccgccaccatgctgctcccccagctct

SEQ ID NO: 13246 - DNA, 1088 bp, Homo sapiens
gatagtgagggtgagggcttcttgcaaaaactggattttacaaagaagtgcacagataatcttagaacaagattcaggagactgggttatatttggtcaaggaaggaatctttgtcaagggatttcttaacctttgctgttttccaagatcaaagggttcgggtggaatgcgacaatgtcggtggtatttcaacttagcaacctctttttttgttttgtcatggttgctgagctgaaagggagaaaatattcaagggatccaccaagaaaatgctcacttaggctggaacagcatataataagagatatgttgtggttataagatcaacgattgccaaaaagctcacttgagggtctctcaggctgacaccacttgtcacttagcagcatgatgcaacctggctctgcagttagcaaacctgggctttccaaaagctaaaaccacctcagcacaggtgcagcttttatagaccttaaaataaagcttactcttataagaatagcttaaactatctttaggaaagaaatgcctggtcattgacccagactgaagacaggtataagagaggggggaaaatcccttaaactcccgttcagtctcttatctgaccatctcattctctatggcccatgtcactggcctgttcctgctgtaagtttcataacactgctgctagcataaaccgcttgggtatcagattgtgtctgcatttatctttgacacaaatcataccgaaggggagaagttgccccttctgaagaatccggtttaccaggatcacctgaaactcccaaaagaatgcagcaactaggcaaagagtgtctccgcctcacattatctgcccaagcacagtgctgttggccaagcctccagcagctgacgggacccagctgtagtgaggttgcagtgattgagtaggattggcctgcttcaaagcagaggtttctcatgggaatatgcttattaaactcccactggtgcagaaaccatgaacagaggatgaacaagtgaagttgcaatctcctccatcacagctcagttccccaacaacaggatcacaagctggagatgcctttaaggtaagcgt

SEQ ID NO: 13247 - DNA, 1088 bp, Homo sapiens
ggtaccctccacgtaatgtctcattccctagggccctggcatagctcagcgccacagcaatcagacaaggactctggagctctggagctgtatagcatctagggtgtacccaggtcattccagccgaagaaaaaaaaaaaaaaaaaaaaaaaaaaaaaaaaaacttcctgctaacacaacataggaggtggttttgacaccagcaagcagaaacatggaaactcacagggaaactctagtcctcttctatgctcaaggcaagagccgcagccctcaagagaccacaggcaaatcaagtgggtcaaaaacaccacaccccctgcagaaactgatccacccagcagacggggggcctcagcccggccagcttccggactccaccaaacttcacagcatgacccgaatcagttccttccagcctccccaaggagcccaggagtttctcggaaagaagcctgccagtgtcaggaaaaacgccaatagctcctcctcgtccttgcaagcctcgatcctacgtgcagccactgtcacccccagaccccacgctccgacctccgagccccccaacgcccgtcacaccatccagcagtctcctcagagtccaagttgccctctccagacccccgactccacccgcagcccaggaggccaacgcggccacctgacctctgacccctgaccccgacctggccctccgcggcacacccacctgcccgggagcttgctgttgctgcgcttccagaattgcttcctggccccgtcgctggccatggcccctcctcatccctcagacccgcggcccagacaccccgagtgcacccggccctcccctagcggccctttcctgtgccccgggtggcccctcactgctcccgggactccagagcctagagccgagaagctcttccgcctccttccggaagttgtgcctacgcgcgcccggaagtcccgcctaagtccctggtggcgagtgacgcagcactccgagcgcccgtcgttattaaagggcgacgccgcgcaacgcacgttacacgcatcgcggagggagcggaggtggttgggtttctgagtttgagtctgtcgctcct

SEQ ID NO: 13248 - DNA, 1087 bp, Homo sapiens
agagacggaggacccagctataccatggagggcgggtgcagaggggccaggcgagagggccaggcaggcacagagacagaggacgcagctttgccagggagggcaggtgcagagacagaggacccagctatgccagggagggcgggtgcagagacagaggacccagctatgccagggagggcaggtgcagagacagaggacccagctatgccagggagggcgggtgcagaggggtcaagcgctgacagtgagggggtctttccagtggcttcccctctggagctcacacacacttactttaatccttataaggccctgtgaggcaggcaccgtaataattgctccataaccagctggcgagaaaatccaagctcgtaattagtaatcatcacgaaacagctttcttggctgacagcacataaaccaaaacagtagatgtgctggttccggctgctgagggccagggtctgcagacctgccctgtgaagcttacgtggcctgccagacttcatgctcggcaggtcccgtggcctcctggggctgtttctttgaggtgaaaagagggtggaccagatgcagttgtttcaaattgctttctgagggtctccctcctgggctggactaagtcagggggctttcatcctccatcaatcaggccaacaagtctattctataaaccggggtccacattcaattttatttgaacaaaatgttctatcagcctgaaaactgctaggaaggtctctaaggccatctggctctgagcctgcgattccaatgcttgttagcggatttgtttgtccagctgttggtgtctcttcttcctggctttgccgctcagccctgggctttccagagctttctaggggtctcctaagagggcaagcgggtggtactttctgtattttaatattgtgttagaatctgggacatctgattgctgaaatgagatgttagttggtacagggaggggtttccaggacccgcacgcccttgcggagtgcctgctggagggagccggtgtgtccaggacacccttgcggagtgtctgctggagggagccagtgtgtcagtgagatggctatgc

SEQ ID NO: 13249 - DNA, 1087 bp, Homo sapiens
ctacaggacagttccattcccacacctgagctttggacaactgaatcctatgccccttcccacccagggaacctggtgccagaaattcccaggacttacccaccatccaccacgccacatagcaagtgtcctcagtgtctgcagaccagaaacaactcccttgtgtctcagcactgggccacctgctgaaaccccaaactgcctgccccattgtttgagacccagtcaggccttggctccaaaagtcctcttggactgccactggcccccagggtctctcctgactgcacctcggtcccggagctcccacaccgctgggccccgagccccatgccccgatccagctgtggctcctttacgggggccttgctggcctttcctaagggaggtgttttcccgagggcaggtggactgctcctcagactaggggccctcggagggccaggcctgggcttctacctcctctcgcaggctggtgtttctctgcaaatatggctcgtgtgtcctccttcctctcagactgggggcccctgaggactgggcctgagtttccctctcccccttcagaatgggggttccctgaggactgacccagggcctccccccgtcccctccatctggctgttaatctccaacacttccacctccagtcctattctgcacagcgctccccagcgctgggagctcagaggcctcttcagccttccccagggctggggctcagggagggcttcctcaggcgctggccccagagtcaggctgcacattggcttggaggacaggcctttcctctgggactgtgaggcccagagtgcccacccagaactccacctctgacctcacaaaggcctgcttcagaactcagtctccactgcactgctggccagacgagggatgttattttgggcagtgcatctggacttggttcaagtggcaccagccaaatccctgccttactgacctctcccctggaggagcaggagcagcgctcaaggccgccttgggagggctgagaggcaggctctggactggggacacagggatagctgagccccagctgggggtggaagctgagccagagacagtc

SEQ ID NO: 13250 - DNA, 1086 bp, Homo sapiens
aactcacgcatttcttggaagtcttgggagattcacctttactcagatggttgtttacctgtctcgtgcacagcttgaccttggactttaaagtgaggataaagaacgaggaggatggggggatgccccccttccacggggccctgtggcttccaaacctcggcctcctctggtctcttgtctgtggagcctccttcaaacccagggaaataaaaccacctgccacgggttgtggttcttctaggatcttctatcaatgttctctgaggtccccaggagccatgaagctggggctgactcccagggcaatgggactgcagtgtccttgttctttcttgttctatgcatccatgctctgctccacccctgccccttcactctgcccacacacatccctctagactggccttgtggtcagagcctggagtgcatgggctgctgggggcctgtgggctgcactgggccagaacccctggcaccttcaagactggcctggagccagcaggtaggtgacctttccagggcctgcctatcccagctttctcctccaatccctcccctctcttgcctgggtcaattagagagagcttgtctgttggctgcctggcagggtggagttcaggggcaggtcaggagcccagtgacagctcggaaaaaaaaaaaaaaaaaaaaaaaaaacagaaaaaaaaaacctacaaaaacaaacccaccattgggcctttcccctttcattcttctgttttctacacagcaaactcagtcgtggctttggagatcactttaagcttgtctccagctggcacactaaggagggtaatggagaagctcccccacccccaaccccaccccttccttccggaagcaaatctaagtccagccccggctccagatccctcccacagtggacctaggaaaccctcagctcagagaacaaccctgcattccccacacaacacccacaatcagccactgcgggcgaggagggcacgaggccaggttcccaagagctcaggtgagtgacacagtggaacggcccagggcgccctcaccctgctcagcttgtggctctaacattccagaagctga

SEQ ID NO: 13251 - DNA, 1086 bp, Homo sapiens
ttttcattcagcaaatcctttccacctggaaggaaattgtggggccggacaacaggccctgctcttagctgggcgggaaggcagatgactgcgcagagaattccagaacagagagtaagtccggggactcggcgctcctcacacagcctctgagaactcttcctggaggaaggggtacgtgagctgagtcccaagggtgcctaggaccgcactgggcgccacaaggaaggaacagccggcacagtggacaagcggggttgtggggcctctggagggcctggcgggtccagacctcatcctagggaccacggggagggccagtgggaggacagcggcgggtctgagagcagctctcccacctccttgagtcccaggaagccgccgcgtcccctgccccacacacctggccccagtttcctagaatcccaggaagcagccgcgtcccctgccccacacacctggccccagtttcctagaatcccaggaagcagccgcgtcccctgccccacacacctggtgccagcctcctagaatcccaggaagctgcctcgtcccctgccccacacacctggtcccagcctcctagaatcccaggaagccgccccgtcccctgccgcacacacctggcctcagcctcctagaatcccaggaagccgccgcgtcccctgccccgcacgcctggtcccagcttccacccacagtggtgccctggggtccccgggcctgcaccaccccaggtgggcaccccagtaccctggcgcaccgactccccagcccactcaccctggcctctgcgatgcagacttgctccctggcagggcccggcctaggcagctcccacgccaggctcacagctgggctggccctacccggccacctgctgcccctcccaggcccctcctcaggaaggtgaaactgccccatttcctgcaggaaccctgtgttctctgaaagtagaaagaggagggaaatggaggaggggaggggaaggttggagagaaagggccaggggtcggaaggaagggctgcaggagggagagaggaggagggagagaggaggagggaactttgctccaggagatggct

SEQ ID NO: 13252 - DNA, 1086 bp, Homo sapiens
tttctcaaacccttagcaccaaatttttccctcagttacactgagcgtttcacttctgcagtgatggagaagggagatcccttatttcttctcatgagcatctctggtgctgtttcccttagagacaaataaggggttctatttaatgtgaagcctgttttatgaacagaataaatgtggtgtatattcagaataactaatgtttggaagtttgttttattttgctaaaattgttctcaaggcagctctggtgtaagagataatacaccacgatgggcatcagaagacctcagctcaaatcccagttctgccagctatgagctgtgtggcaccaacaggtgtcctgttctcccagggtctcccttttcccatttgaaaaataaaaaataacaattcctgccttcaggaattttttttagggggtttaatggtaaaggtgtttatatctgctaaggtaatttacttgatatatgtttggttatttaagatatatgagttatgttagctatttcatgtttaggctgctgtatttttagtaggctatattaaatatttgaaaggatttcattataaagaacaaagtctcctaatctttgatatagcattgacatactttttaaatatacaaggcatagaatatggccatttctgttaaatcatatattcccaactggttattaatctaagaattcagaattttgagtaattgcttttgcatcagattatttacttcagtgctctcaattatgatggtgcattagaaccatctgggttaacatttgttttttattaccaatacctaggctccaaccaagtacagtgaaactggaatgtacagagtggacaatggaacgaaggagaacaagaccaaaggacattttatttttatctgtatcagtgggtcaaagtcctttcagaaggagcatatagtggacctaggtgattggtcaatttatccatcaaagaggcacacaccgaattagcatggagtgttataaaaggcttggagtgcaagctcatggttgtcttaacaagaagagaaggcttcaatggattctcttgtggtccttgtgctctgtctctcat

SEQ ID NO: 13253 - DNA, 1086 bp, Homo sapiens
agtgctttccgtacagtctttcgcatggagtagagacaggcacacagcagctcaagtgctagttgtcatccccttcccttcagtccctctttttggagctcccttttcttaggagccttcctccgtcgccctctaaggcctcatctgacatcccatttcccagatgggaagcctgagcccaggatggccacactgcccacagtcagagaaaggacagggcagaacaaggactccactcgggatccccttgctctgccctcccctgcctggaccccgtcagctcaaggcccctctcagcctcatcccctgtgcctccgctctgtcctcctaagctgagcccagcttctaggtttgctcctccagctgggctctttatccccagaatctgacgaaggtaatcctcagcggggttggggctggattctttcttcctgcttcaagcagtcaggcctcaactcaggccctgggctgccaggaggcaggacttgaactcttgccaggctgtgaagccagagatgagaggcttctgtctctgaatctcctaagtctgcaccaagatgtagtgcctgacatcctccccgcccatgtttggagaggagcccagatgatctgggacaagggttggcctggcccagctcagctggctgccaactgtcatgataagtatatgcttttatctgaacacccttgtcttggaagggcagggtggaggtaaacttggggttcagagtcccctctaaccaccctccaacttcccctgcaaactcccaagaaggtactgagacctgagaattcagtgctcgtgctggggcaccctgagctgcacccagtgggcccaaccccaggttttggctggctgcccaggcacggaagacacacccaggctgtggggattggctgcctcagcccagcccagcccagccccgcctcctacggccttccctagatcaggggccagggccaaagacctcccagcagaagaggagaagaggttgtgtgggacaagctgctcccgacagaaggtaccaggctgggggtggcagggctggaaggtcctggcctgggatgaagaggggactgcctaag

SEQ ID NO: 13254 - DNA, 1085 bp, Homo sapiens
ttatgattggaggaaaatgccaggtctcacttgccagtgatgaccaggtcccagggtttgtcagggtaccagggtaggggttggagggtcaggccacccagcggcggtggcggctctgggtctccctaggagcccgggctggccacagccaggcacagcacagcccgtgaggtctggtcttgggaatgcgggtgtctcctgccttaggctgagggtgtgcgtttccaggccagccgggacagttttcagcctggggaagcttggcctttcctgttcctgccccccagtgcccaccgtccccacacacactggtggggtttgtggggtggacacaaccacatcgcaaggcccctatgcctcctctcctcccgctccgttcctgggctgcgggacagtgctcggggcccttggccattggtgtcgagcccattcacagcctctggacgcaggtcagaggtcactcgccacggccacagctgcgctgtcccccactcccagcctggcaggccaacctgcaggaccccgggcttagctgggttctgttctgatgtcgcattttcaaggtccgctgagtccgagccctgcctgggtctggctgctgcccgcccgctctctggactgtgctgatgcagagatgcttgttttcctgtgacgtcagcgtcagctcctgcacatccatgccgtgttttagtttgtgcctcagctgctggctacagcttcccgggggagccgggtaccacccgggcctggagacatgaggaggcagggatgtgaggggcgggggacaggacagccggccttccgttaaatatctgctcctcgcgctcgagcctccctgcctattgtcggggccggaggcgagccgacgcagcatcagctcgtcaacgggaaggaagatgcctccctgcacgcccgccgcgcacagagcataaagaatctgcgctgaggaggcaggagaagaaagccggtgagtcgggggcatctcccccgtggattttccgcgcccccggggccgggccagccgtgctgcaggccctgtgcgtgcggaggacggtgcccgagtcagcattttgggtctgagtccc

SEQ ID NO: 13255 - DNA, 1083 bp, Homo sapiens
tataaagtgcccaggaagcacatctagcacttagtagctactcaataaatgcacattaccgctatcgaaacggccagcctgtgtggcaacttcctcacctcagtccatctgacttccaacaggcacccgggagcaccaagtaataaattgtgaagagtacactttgaaacgtatcatgttctacgcacatgtgtagggtattattatagttcaagagaaagagggaacccgctggtgtctgagaagaaacccgctggtgtctgagaagaaacggtgaagggtgcactacgaagggaatataaactaatcaaacattcttgaatggcaatgacagtcactaaagttgacacttcctgcagtcttttagtttagaaaccacacttcccgagacgtcccccatcccaacagggataaaatcctctagctcaactcaggtatatccccactattgggccagggagacctgcggatggcgagagcaggttctcttaggagggtgtggattgtgagcttgtgcgctggcgaggagcagaaggtcagggaggcaccgtagttaatgaatcaataaaccaaacagccgatcaatcacttcctgcagtccgagtccggcgagggctaatcgattggtccgggtattttgaaaggaaaaacggcggtggatatgttgtcaaacggaggggtgcaggagaggcggggccaggcctccaggtgacccctctggcttcctgggcctgcagaggcgccgaaacgtgcaggcgccggcgtccatgaggcgtggggcgcgccgggcgagtccctgcttgcaggaggcgcccgagaggccgtcgcgtaccctggcaagaggagctggttagcacctcccgaccccgagaaggcccagggggcgcccggcgggcggggcggggaccgggcgaggcccgcctcccattggccgcatagcgccgcccagcgcgggccgccgttataaagcagccgccggcgccgggtgcctcacagcacgctgccacgccgacgcagacccctctctgcacgccagcccgcccgcacccaccatggccacagttcagcagctggaaggaagat

SEQ ID NO: 13256 - DNA, 1083 bp, Homo sapiens
ctttcactttcgcgtctgcgtaggtgtctgcccgagcgggcacgagggcgcgggggcgcgccaggagacgcgggggcgcgcggcgcgccgcgagcggaggaggaggggtcccggctctcggccccttcctcggcttgccccgccgagccgcctccgcgggcgtctgagccgccgtcagagcgaggggaccggtcgcgaccgcagcgccccagccagctccccgcacgcctccgcgcacagacgcccgctccctcctcggcgcccccccacggcgggggtggggcagaggcgcggcgagcccgagaggggcggggagaggagcagcctggcggggtgggcagccgaggagcaggaaaagaaaacttttccctcccgccccccgcgcgaggtccccagccctcgcctccccccgcaggtgggaactgcacctgaagccgggcgcgaggtcagggccggactttggagggctgcgggcagggctgaagggggtgcgtgcatttgggctcagttttcctttggcctccaggttgtcagtggccgtagtgggagggcggctgccggcgcccctgcccgtttcccacccgcgggtggccggacgcggtgccgcctcctcccgctcgtgagggcgtgacccggggaggggggcgcaggctccccctgcgaccgccccctcacacacgcgctcggccgccggagctgtcaccggccacccagggcccggggagggggcgcggagagtggcgctgcggagcggcgggcgcgggatcctcctgccggacttcccggctcccagggacgccgctgtcaacgccgagcggacgcgcagccccgggagaggggcccgccagaggcccggccgccgccgctgggggcgggcgggtgcccgcgtccccctctgcgcgatttggcgccgctgcctcgccgcctcttgtagggtaacagcactattgctctacccaccgtcagcagggcgactgccactgccgggattatcatcctctccatcctcaccgccgatcagccaatattggacttgctggtggcggcggcagcagcggcggcgggagtctagccgttcccctt

SEQ ID NO: 13257 - DNA, 1083 bp, Homo sapiens
cccgactgagagaactatgaggaaggagggggcagcttttgccatcactaaggtaaagaggtgccaggcagctctgctcggtcccagggctcaccaaccctgccatcattcccaccagtggaccccttcttaaccacacccaggcccccatattgctgaggctattgattcctacagaccaggccagaggtcagctcagtcctgttcctttctaaggcctttccacacagagatgaagtctaggccctcaatgcccttcccctgaactcttcttccaagttcaaaatcctcaaggagcaagaaagagggcaggtggctgcgtgtgtgttccagaggagagaggcgaggagttgctgtggaatgggttatgtgacaattttgttagcctgacaatgcaagggtgtgaacgctatctgtgtagaacagagggaatggcttcaggtgctgctcaggattcttccctggaagaggtcatagctgtggtgagaaggtaatagcatcttgcctacagccccgaaagcaggctctacctaaagaatcaggcataaaacagaagttccctccttccttttacaaaagaaaaggctgcttcctggtgagcaaaccaggggagacagggggcaaggagggcatcctacagagaccatccctctcacttctggtggtcagtgacccaggaggacccagagaacctcatcctcaggctcctaggcctctgttccccactcctccaatatttccaggcctgctgagttagggctcagctgcctccctcttccctccgctggaaacagaagctcccagcgaatgtttctaactcctgagtccactcagccatgtcccccttgcaaaatcctccccttcccgcacccccctgcacccagccagccaatccgcggcctacgagcctcgccagacccatctcccagggcctcagcgggataaaaccggtcggtgatgccgggtggatgggaacaaacttcagaaggaggagagacaccgggcccagggcaccctcgcgggcggacccaaccagtgagggcctgcagccggccggccaggtatgtcacccaggggttagct

SEQ ID NO: 13258 - DNA, 1083 bp, Homo sapiens
attagaaccaggatttgggaagcctcagttcaggagtccaccgaggtgtgtgtgtgttgacaggtggtggtgatgccgagggcgtgttgacaagttttccccgcccttgacctttagcctagatattaattctaccaactggggcaaccccagagggaggaagccagggtcccccaacaggctgacagcgcgtgacctttgccctagatagcctgagaaagctgatgagagaaggggcgagaggtgcctacagcccccaggaccggccttgtcccttttgccctaactcctccacttatccccaccgcccgtttcctctcacccaggcaggacagcttggctagcggcaccagcatgttcaaagtcaccaggactctcggtcggacacaacaggaggactgtccgctgctcgcggcgggcgctggacctctaggccgcggggggcgccatcacctgccggaaagcaagaactctgctgcagttcgcctccccgctctgccgaccgctcttgcttcacggcgttcccacctccttctcgctctgcgccggcgccatggatgacgcaacggccagccgaggcttccgggtcatgtaccaaaccagggaaagataagggactccaagtcccagccggggagcggtgaaacagccacagcgcggccagaggggtccgcgaatcccacagcacgacgcacgcgcagtgaaaggcagtagaaggcggggcgacgcacacggcttcctgggaggtgtagttttctctacgagtgcccttcgagatcgattggaggctcgcgcaggagccgtgagttgcctaaggtgaattgactcatatgattggctgtcccgaaaaatgaaacgtctttgtggtccggggctgagacccacgaggagactgggcgggatttctggcgttaggaggcggggcctttcggctttgggcgcgagtggttaaaagacagttggtgtcggttcggcttctcgggtcggattccgcggtcccaacccttccccatggccgaccctgaggagttgcaggtttcttcgccgcccccgccgcctccctcttctccctcctcttcagac

SEQ ID NO: 13259 - DNA, 1083 bp, Homo sapiens
tccagttgaagtctgtgtgcctaccaagaatggccggaggactcgctgcttgacgggagggatgctccagcttggtctccagggacaactgtacctggagataaagtctggataccagggagggacagagatgctcttccttccacagtgtggccacttgctgggccatgtgaaccagcagaggagagttccttggctatgctgttgttcccccgctgtccagggagaatggaggtggactgaggagtgaagtttgggcgaactgcacagagctgctcctcttcaccccgaaaatttgtctttttacagaatccaggttctcccctccctcatcactgctgttgcttcctttgaaagtctaaaccactggaggcttctttttccttcctctctccttccccagtttcctctgtcccaattaaaaccaggatggagagcatttgctggctggccccaattattgtacccttgcccaaagggaggggcctctgtcgtgacccctcagaaatctggcagtctgggtttccacctttcccctatttaactctcagcccccacccatcccctggggttgcggctggcaggccgggacttgcagaaccaaatgggccaggggccaagttcattcttttgggagagagcaatggtaccttcccttaacgggaaaacgagaaatattgaggggaagatggactgcgatccaaacgccctggctctcaggcctggactctagggcttagccagatgcctaaaccgcccaagccgagaaacaacttagaagacagacataaccctgggattcagggaaggcgcgagcaccgcccaggacctggtagggtgcgagccgcgagcagtccgggagggagcgcgcctagggcggagcgtaggctgtggggggagggctgggagtccggggccgccccacacccgcactcctcccgggtttctgctctccgcccgtgtggagtggtgggggcctgggtgggaatgggcgtgtgccagcgcacgcgcgctccctggaaggagaagtctcagctagaacgagcggccctaggttttcggaagggaggatcagggatgttt

SEQ ID NO: 13260 - DNA, 1081 bp, Homo sapiens
ctttgctcctgtgggagtcatacctctttcccaggcaggagaaggggcaggcccagggcaagggaatacacatgacataaaatatccccagtggccaggcacggtggctcatgcctgtcatcccaacactttgggaggccgggcgggtggatcacctgaggtcaggagttcaagaccagcctggccgatatggtgaaaccccgtctctactaaaaatacaagaatgagctgggcgtggtggtgggcccctgtaatcccagctactcaggaggctgaggcacgagaattgcttgaacctgggaggcagaggttgcagtgagccaggattgcaccactgcactccagcctgggtgacagagtgagactctatctggaaaaaaaaaaaaaaaatccccagtggcttcgtggggatgtccagcttattctttttctaatatgctaactgcaccctggaccaaatgagaagaatcccagaacacactgtgctgagaacataagcgtgtccaattttgcccagaaatggccagtgttgtacctgggaagaggcagagcccttctcctcacacctaaaccctctggtgaatggagaaaagctcgggtcagccaacctcagaccatccggggccagccacagtctgacaggtcctaagataggacttctgtgctgactccagacagtgcagtcagcacaggctctgaggctgctgtgtgccttaggccaccaaagtgtcgggcagagtgacagccacaaaccccaggggaggggcacagaggtaccgagaaaggaccagaagcctgacaggaagtaggcaccgagagtgagggcccctgacactcctgcttgagctgtgacagcatttaagggttttctgcctctgcagggcccgatccagatgagaagggtggctgcagtagggctgggcgggctgactcagtggcagccgcaggccttgaccaccatgttgcggtgcttgcgcaggatgacgttgttgctgctgtcatagtagagcacagaggtggcgctcagcttggtgggtgcacagcacgccttggggactgcgtttggcttcatcaggtgcac

SEQ ID NO: 13261 - DNA, 1081 bp, Homo sapiens
aaatggcagatgtgtcaaacagactaggacaatcaggcttggccaaaaactacctgctactgaattacctggggcagattttggatttcagaaacatggaggctggacctaggaatgtgcatttttaaaaagctccctggctaatcatgaagcacactgaaattggagactcactgattttagaaaaaggggtcccagacctaaggatgaaaggttggaggctcaaagcctatcatctcagtcaccaagtgccctggtgcttggatacagaagggagctccacggagaaatgccacatttgaaagagcagctctcaaagcaaaaatatccccagccctttctgctctgtcctcacatgtactgcaggtacactgggctgtaatctgtccagcaccccttcaggctgggatggacaggagtacaggcacagatgaacaaggttaagctagatcctactgtgaggagggtgaaggaggtttggactcaatgcgggtcaaaggttagggtcaaaagtcactcacgctactctctggagctccaggcaagttcagcagctcccagtgccccgtgcatccgagctccacggcccgaaggggtaggtccaggggatctggagggggtagcactacggggaaaggtcaaaagtcaggggtcaaagttcattccatatcggctactccgttccatttccctcccctccccctcaccaagtcgctctgtctccatcatcctggagccacagcagctgcctggcagcccggaagtgcggcaagtagtcgctgcgaagtaagccccgccccggaacgggcggaagtagaggcaacttccggtacagccccgccgagagcgtgaactatcgctgcggaggggcagacctggaccggtggaaggccgggcggaagtgcgcgcctggggccgccttggttaccgcgttttccgctcctcgctacgtcatcgttgtgagcccgctatcagcggccagcgcgggcgcggccggagaccgtggggcccccggttgccgccccctcgggtaaggccctctgcttctcactcttcggccctttttctcatagccgtttct

SEQ ID NO: 13262 - DNA, 1080 bp, Homo sapiens
tttggagttagagttgacagggcttactgacagatagaatgtggggatccagggaggtgaagaaaatgaccattcagttcctcctagtgcacctggaaggatggttgggccatttactgagatgggccagaatgacaggtacaggtttttggtgaaggtgcatgtgtggaaatgaagagttctgtataagttagagatggtcatcagacactcaagaaggggtgtcaagtaggcagctgagctatggctctggtactgcagggagggtccagctggagatgtgaatcaggaagtcattaacctacagggcagcaccctccaatagaaatagagcgtgaacctcttaggtgacttaaaatttcccagtaaggaccggacacggtggctcatgcctacaatcccagcactttgggaggccaaggtgggaggatggcttgcgcctaggtaggagtttgagaccagcctgggcaacatggggagaccggtctctacaaaaaaattaaaaaaattttagctgggcgtggtggcgcctgcctgtagtcccagccacttgggagtgtgaggtgggaggattgctttagcatgggaggcggaagctgcagtgagccatgatcacaccatattatttttccccctgctagccacattgaaaaagtaaaaagaaacaacaggtgaacttaattcaaatatttctaccaccatagctacaaataaaaaaaactaattcaacaaatgtacttatttaatccaatatatcccaacaattattgcagcacataatcaatataaacattatatatatgaactatttgacactatttgacatttcttcttccacatccagtgtatctgacatttagcgcacatttgatttgcactcacccactttgaggagctcaattgccgcttaagtccgtggctagtggctgccctaaagttcagcaccgccacggagctttgggtccacccggactgtaaaaaggaagcacttccgttagcatgacccggcctgaagtagcggcggaacggaagtcgcttgtgtatgaacgcagcggcggacctgtgaggggatccgacttg

SEQ ID NO: 13263 - DNA, 1079 bp, Homo sapiens
catgtcagcaggcttatcttgtgtaagaatcattttattaatatctgacacagcaagggagatgaggagaggtgggaagagggagagaaaagtatgagaaagacaaataaacaggctgaggtagacaatgggtgacacagaaaggaagtgagacagagactaagagagatagaaaggagagaggcagggagatggggcagaggccaagaaaaagacagaaggatgagggaggaagatgcagaaagaggtaaatgtgagatagatcaaaggagatatagagtcagtgagtgaggggttcagaggcagaggggagtggggaagtggggttcccatggagggattggggcccaggaggcgctctctccctgtgacctgctagctcagccctaggcaaacctcaccaccccttctttcttgcagctgtttgagctcttctctggcttcttgaaatactttcctggggcacacaggcaagtttacaaaaacctgcaggaaatcaatgcttacattggccacagtgtggagaagcaccgtgaaaccctggaccccagcgcccccaaggacctcatcgacacctacctgctccacatggaaaaagtggggtctgggagaggaaaaagggaagggaggggagggagggcaagatggagaggtgagaagagggagggaaaaggggtagggaaggggaagatggggagggaagaagaaagactagggaggggagaatagggaaagggaggagagaacatgaggaaggaaagaaagatgaggtgaaaggagggagaaaatagggaggaggaactgagacagggagagaggggaggtgggaagacagaatgaaagacagagggagagagagagaagactggctgaggaaggaattcggggcaagggacaaaaatacagcaacaagagaaaaaactcacagaggcagaaagagacggggacaaaaagagagaaacacatcaaagagatgtggagagagatagaaacagagttaggaagactaaagagaggctgagagagatgagttagagatacgcggttggatgtgtagaggacagagaaaagcaaactgg

SEQ ID NO: 13264 - DNA, 1079 bp, Homo sapiens
ctgcgaaacaaggcgtatctactcttgttttactcccagacacttccctgtcccgcttagatcagtggtggttttcactcaaatttaagtgtgtaacagtgtccccgggagggctctgttcaaacagattgttgtacgcgccccctacccctgcccaccccgagtgtttgattcagtaggtctagtttgggatcgagaatctttttattttgttttccttttgttttgttttgttttgtttttgagacagggtctcgccctgtcgcccaggctggagtgcagtcgtgccatctcggctcactgtagcctctgcctccccggctaaagtgatcctccagcctcagcctccggagcagctggggccacaggcaagcgccaccactgtaggctaattttttttttttttttttttttttttttgtagagactggggtctcactatgttgcccacgctggtctcaaactcctgggctcaagcgatcctcccgcttcagcctcccaaggtgctgggattacaggtggagccaccgcgcccggcatcgataatctgaatctctaacgagctcccgggcgacgttgatgcagctggtaccgggaccactcttcgaaaatcatcggtttagaggttttaattctgaatccattgcgaaaactgttgggcggacagagcactactaactcctaacttttctcagaaagctgggctctgctttcgccagcaacccggtccgaagtcgcgggcatattctgtctgaaatcgtgtgcaccgaaatccccgccttgcggtggaggctggcgctaggcggcctcagcctcggcctgctgcgctcaggaacccgcgccccggctcctcggcgatccattgctctttcctctggcgccggccgcaggcctcggtcacgcccccagcggcccgttggtttccgggtcccgcggggtgcccccgcccacacgctatgccttaaattgggccaggctgaggcgctgctgctggagcggccgatccgagacgtggctccctgggcggcagaaccatgttggacttcgcgatcttcgccgttaccttcttgctggcgttg

SEQ ID NO: 13265 - DNA, 1079 bp, Homo sapiens
ggcactctacgacatctgtttccgcaccctcaagctgaccacccccacctacggggacctcaaccacctggtgtcggccaccatgagcggggtcaccacctgcctgcgcttcccgggccagctgaacgccgacctgcgcaagctggccgtcaacatggttccctttcctcgcctgcacttcttcatgcccggcttcgcacccctgaccagccggggcagccagcagtaccgggccctgacggtgcccgagctcacccagcagatgttcgatgccaagaacatgatggcggcgtgcgacccgcgccacggccgctacctgaccgtggccgccgtgttccggggccgcatgtccatgaaggaggtggacgagcagatgctgagcgtgcagagcaagaacagcagctacttcgtggagtggatccccaacaacgtgaagacggccgtgtgcgacatcccgccccgcggcctgaagatggccgcgaccttcatcggcaacagcacggccatccaggagctgttcaagcgcatctccgagcagttcacggccatgttccggcgcaaggccttcttgcactggtacacgggcgagggcatggacgagatggagttcaccgaggccgagagcaacatgaatgacctggtatctgagtaccagcagtaccaggacgccacggccgaggagggcgagttcgaggaggaggcggaggaggaggtggcctaggctgctcccatcgcttcccacctgtcccctcgaggcttctgacctttgatccgctaggccccccatctctgaaccctagagccccgctttccctccaaggctgactccccgctgaccctaacaatacctttggagctcgctttacctctggctacttcatctccgaccctggctcccctttgagccctaatttatctttaacccccttgagctcttccaaccttgacattcccaggaggagccccgcttcaccccttctgactctggaaaccgcacctttaactttgcagaccttccttcacccctgacttctgcttcacctttgacctctgccccccatgaatcccattttacctct

SEQ ID NO: 13266 - DNA, 1079 bp, Homo sapiens
aagacgtctaaagcaccatccaggttcttgcaattaaaatgagatgacaaacacggaaacatgtgccctgctgacgtcatggaacggaaaggggtggcatcctgctgcgtcacgtcgacgtcatacagcgcacgagggaagttacactggggaagcaatttcccccaaggggcaacattcgagaaaaacaagttagctcagacccgaagaatgaccaccccactctaggggacgtcttaaaaagggacactctcccctcttccaaactgtatgattcccctcatcaggcaacaaggaactaatactcggggtttacaggaaccaggggatgggccagatatggagaaagagacgcctctggccttgggggctcgttcttgagggaatcagcgtgatggggatgagaagggcatctttggaacgggggccttctccataggaagaggaggcgagtcccctggccatatttaaaccacagttctccacgccacctgtgcgactcgggatccaacctccccgcaccagccccagtccaggtacctggaacttagtccgatcggtaaccggcgactacgtggggtacaggtacccgagcgcgcccccgacagacgcaccgacctgcgcgcgcgccgcgggcaggatgcgtgcgcactccccggacgtcccgccccgccccctctgcggccccgaagctgggcggcgtgcgcgcccccgcgccgcgccgagccgggcgctcggaaaggcgtccccgcggtgcctgacagttccttcctcagcgcctgccccgtgagtgacgaggagcgcggagtctcgccatatcaggagggccctgttacgtgaggctgtgcaccgagactattccaggaagaagaggggacacttggtgggcggggtgatttcgggcagtcaggtgggcgacccgcgtaggcgtctgaaaggcccgcgtcgttagggagggcaggagtggcgtctctggttacggggtcgggcaaagggcagaggtcaccgtccaggttggacagcagcacctttgagcgatggcggcgtctggggaaccccagaggcagtggcaagaggag

SEQ ID NO: 13267 - DNA, 1079 bp, Homo sapiens
agtcgagtgagggcttgagtctggtgggggcgggagtgtctcccgccgccgcgcttgtgccgccgcttctccacacgtgcactcgggtctctcggctccctcccgccgctgccgccagccagacccgctgccgcgctgtgacctttcaccccgcccctcgcgcgccggcgcgccgccgcctcacgcgcagccgcactgctcgcctccgcgcaccctgccccctccactccggaacctccatctttctcctggactgggccttctggggtcatgctcctccctcccacccgcttacgacactgcttgtggggctggctcggtaggccctggcggtaaaatccagatttttccacccctccctctcttgtcccatatccgcaagatagtttttctcagccccgttcttcccagtttgtggtctccagagtgaccttcaaacgctgttgcctcctagtagggttttataaagttagttcttctaaatgtaaagaaatctgtggaaagctcaagtttaagttaggtgttttaaaacaaacgtagttaacaatcggccagatagattggctaccctccagcacgcctcaagttttaagatcacgtgattggcccaaacctcagagcctggaattttaccggcggactccagagggacggaacgccaccgccatttcctgtccctcgattgtggcgtgaacgtcacttccttagcaatgcgctttaactcttgctgtccacattttccacattgtactttataacatactctttgtgaaaatttatcttttatttctttaatccaagaaaattaatattcaagggatccgtaaaaattcaggccccccgagatgtagagcgctgggatggaggaggcagggcggagctcgacgtcatgtgactggttgggcccgcccccccccccccccccaacctgtgcagctgaggacttcccctccgtggtgacagcctctgggtcctcggtcggtacagtctctgcacctcgcgccccagcaggtgagcggcgaccggtaactggcgagtggtggggatagagggggtggaaggaggcagaggaaggagag

SEQ ID NO: 13268 - DNA, 1078 bp, Homo sapiens
attgcatgcatttattgtttccctttcagctgtatgttcaggaagaaattacagtactgaagaatttaacagacttactggctgtaagcagaatgatagtggtcctttcccccctcttcttcagccaaagatgaactccatgaattataagaattttggaacagtcttttcttctacttacataagatgctcaaaaatagacagaatggcatctattaccagttaaaaatgtttctctaacaatactggaaagcaggacatactaaaattcagtagttactggtggagaaagtagtttgtttcatgggaaccgttgcagagatgacaagcctggaggctttgagagcacaggtaattgttatgtgagatttctctaaagattctgctcgcttcagtaccatgaaagatgaaagatgctacaattagtatgcacacaatgaaactgagatgcagatggaaactcagagtttcttttgttaccctgaagaaaattacattgctttattgccgtatttctggattcaagttttaagaatctgttgaaggttttaaatagtttctaacccaatttgtatgtatttacttgtcacttaaaatatatatatatataacatatatatttatgtatttttcactttgttctgctctactcttctctggattggcttcttacttatctttgtttaaatcattgtgttggggtcaactctcccattagggccttgtatgaaaagaccgattgagaaaggctagattctccttggtttgatagttcctaatgttttgatatgtccagccaaccatctgcaactacaaactccctgctgagtaactagcaggaaacaaagaaatggaaaacagcaaagaaatcaccacgtgagcagaagatattttggcaggctagctgaactgagaccagattctcctgggaaatttgtataaaacagaactattcacaatgaatgtgaaattaaaagcatgatgtagtagtgacccaaaaggaatgtgaattctcctccagaacatgcagagacccatggatgaactgtgtttctagatttttcctccagctttcctg

SEQ ID NO: 13269 - DNA, 1078 bp, Homo sapiens
ctcttctttatcgatcaggccaactacttcctcaacttcccatgcaaggtgggcacgaccccagtctcatctcctagccagactcccagaccccagcctggccccatcccaccccatacccaggtacggaaccaggtgtactcgtggctcctgcgcctacggcccccctctcaaggctacctaagcagccgctccccccaggagatgctgcgtgcctcaggccttacccaggtgagagccctgggtgtgagggatgtgaagtcgggaccctgaatcacggggcagtgctggacagcccacctggctcacatcttgtctgcccctgtccccagaaatgggtacagcgtgagatatccaacttcgagtacttgatgcaactcaacaccattgcggggcggacctacaatgacctgtctcagtaccctgtggtgagggtcccactctgcacccctccacccctgcccctctgacctgtcagcccttggttcccccaagtgtaggtacctgccagtgggccaagctctgagcttggtcaagggtagatgtgccaatgaagacctggcctctgttccctgccaacccccagaggtccccagcctcactcccttcccctccctgcctagcctctattcctcaaaaggaatcctgttccaggacactctgtccttctcccctgtgacccctctaagtggtgctcccccaacctgtgggcaggctctgtgcccgccttcttgagggtgtgggcagggcagggtgggctggtaggccatcagggccctcatgcagcccctgctcgggtgggtggccagttcccctgggtcctgcaggactacgtgtccccaaccctggacctcagcaacccagccgtcttccgggacctgtctaagcccatcggtgtggtgaaccccaagcatgcccagctcgtgagggagaagtgagcatgtgggcagggctgggctcagcgggtagggaaaggcgaggggagggcttctgctgacacgtccaactgtggccccaggtatgaaagctttgaggacccagcagggaccattgacaagttccactatggcacccacta

SEQ ID NO: 13270 - DNA, 1078 bp, Homo sapiens
gagatatggaagagcctgggaatttagcggctcaaatcagctggcaactggagttcatttaggtgattcacatacaatttccggctttccttgcaggtatcagtggtcttggacgcggggaagggggttgggggggacaggtgtagaccaggaccttggttattggtataactgccaatatccaagggttgccaagggttgggtgggcggagttcccccgcccaggccgagtctctccagaaagacttcggaggagcttactccactccccggacggtcccagtggcttcgttctccacggcccagaagtgggccgtaccttccgattagagctggggcactctaggaaatgcgggtgaccgtagctccccagaccaaacctgtcttttccaccaacgagctggcgcatttatcgcccccgagtgctccggcaagccagcgggagagtggcgtcgggttgcgagcctcttgccccaccgagtgggggcagaaagtggtcagaggcgcgttccgcggggcgctgcgtgcagaaaagcgaccggcggccacaggtgatcccgaaggcgaggggaaggcgggcgcccgggcgagggcccggggcgcgggagggcaggcccggccggggtgggccagcagagccgccgctgctactcacctgcccgcgggggcggggcggggcgcggcgctggggcgcgcctgcctcccgcctcccgcctcccgcctcccgccccgggaggaagcggaggggcgcggtgtaaacagagcggcggccgtgatgtcagccggtcacatggagcctcttatggctcgggatggctctcggcgggcgggcagctgcggcagctgctgctgtggctcgggcggcggcggcgcggcggcggcagagggggctccggggtcggaccatccgctctccctgcgctctccgcaccgcggcttaaatgatgtattttgtgatcgcagcgatgaaaggtgagcccgggcgccccgccggggccgggtgggctggcggctccggggggcggggaggagggcgcgcagggggaggggtgggcgcgcctgcccgaacgcacgtact

SEQ ID NO: 13271 - DNA, 1076 bp, Homo sapiens
cagacagcaaagcaaccatacactaagtctgtacagcccttacagtttacaaatcacctcatttaattctcacagcaacctcttattttcagttggtggacactaaaggagacgaactttttttttttgagacagggtctcgctctgtcgcccaggctggagcgcagtggtgtgatctcggctccaggcagcctcgacatcccgggctccgcccacctcgtccaactaaagtactgccgcgcccggcccgagcatctttccaccactgtcagaggcaatcttggtgactgtttccccactccaatatcctgccaacccaaattacatccaccataggaattctccctgagccgagttgttttaataagacacctcctccctagcctctaaccttctgttcgatgaacagctcctcgcgtcgcttcctcttctccttcaggagcgttttatccctgggaggaagggtgataagtcagcaaagggaaggacaagcgggacgagaaagggcggttctccccgccgggcagcgggctccgaacctgcgcacggtctcccgcactcgccgctcctcttctctcgcttccgcctgggcgctggcgaaagtcagctcctccggggcctcatcgtcaaactcatcgtccccttcctcgtcttcctccaggggctcggcggccgcgccgctgctgggctgcccgagcaacagcccgtgctccgcctcctcctcctccgaggccagctggccctcgtccaccatcgcctccgccgacgccggggcgcgagacgctcgcggtcggagctgcaccatggcccacgcagcgctagaccgtctgacctctgacccggaagcagctacaagcggagcgcaagcctactttcatcgccccctgcaggttcggaggtcctcaggacgggtggggcgcatgcgcgaagggaggaagggcgtggcctgtaggcagtgggcgtgtttctttccacgtggccagcgcaggccgccttggagccggatggaccccacggaaaatgctctgccggcgaaagcggctggcaatggggttgatttcaaggcagggaagagc

SEQ ID NO: 13272 - DNA, 1075 bp, Homo sapiens
aggacagagggagagcttcattttctataaaacacagtctgcagattgaggagatgcagcctcggaggtggagagctataaagtcaaaaaccacagagcaggatagaggagtcagaggagtgaagaaaagagtcttgattagacagcctttaagccccaagtcacatgtctcttaattggctgttcctaggtggtcagttagttcttaccacatgatctgttggtgagcagttggaaaattcccaggtacagattttttcagaaaatgttatttgacttggctacagaaaaataggttttgcaacacttactaagaacacagagaacatgaccatcacctaaacctgccatggcctcttgggtttgtttttgcttttgaggcacagggagtccttcttgtctgtttacctggaggcatgatttggcaacctagataacaaacagagataggctttctaaaaagaattatttttatttgggaataaagcattgcaatgggaatatgcgtgccaaggtaaactatgtgcttattcaggtaggtaaagtaagacaaagtttaaaaaaataatgagaaggattacatatttgttttggaatgattatccttggctataaagatcaataacaagactgacatcagtttgaggttggacaggcagttgctgggcagatgttcttgcagaagtatttttctttaggttcctgagaatctataacctttgggcttaccaatagcagtgactgatttgtttactgattgttcacagaataggaaatcaaaggaggccaaaataaggacagccataattatttgccaattgtcaatttgaaaagggtacccaaatccctccatatgaggagtagcataagtggcttttctactggctgccgctgtagacccacctccttctccagcacataaatatcgctgttaacattaactaaatcacctctgggcagagaaacaaagctctatatgcacagcccagcaaagagcagcacacagctgaaagaaaaactcagaagacagagctgaaaaagaaaactggtgatggatctcattccaaactttgcc

SEQ ID NO: 13273 - DNA, 1074 bp, Homo sapiens
gacggactgccttttcttaattgatacaatagcccagctcgggttttccacctcctcccccaaccccaccccgcctcacccctcccgcccgctgccgccgccgccgccgccgccgccgccgccgccgccccatcgcccgcccggggctctgtcgccggctgcgtcccgtcccggccgcggcccgccggctccgcacccgcgctcgggccgcagcgcccgcctcgccgcctcgcccgccgctcctgcctcgggggtgctgcggcggctctggggctcgagcgcgccgccccgggcagcccagggacttttaggctccggcctctccactcgcctcagccagggagctttctccctcgcccccaaagtttctgggttcgttggaatttttggattcaggaattttttctttttttctttttttcacctaggaattttggggccatactgcaatacttttgacaaatcgaccgcactttctctctgctagctctctgcccccttctttttttccgagcaggggaaggggcttacgagagagaggctccctctggacaaagttttccaaagttttccgagtgtgatggtagcggggagagcaaacccaccagcttgactcacggcttcatctcaccaccccttgagcagcccctaagcccgctataaaggaacaaacaaacaaacaaacaaacaaagttgcaccccagtcgcctcgtgtttcctctcttcttttaggcaatttttttcctccctctctccgctcccctcgcagcctccactccctttcccttggccccttcctccttctctgtttcggctggaggtgccaggacccccggccgcagcctcccctcccccgccgctccggtcccctcccgtcgggccctcccctcccccgccgcggccggcacagccaatcccccgagcggccgccaacatgctctttgagggcttggatctggtgtcggcgctggccaccctcgccgcgtgcctggtgtccgtgacgctgctgctggccgtgtcgcagcagctgtggcagctgcgctgggccgccactcgcgacaagagctgcaagct

SEQ ID NO: 13274 - DNA, 1074 bp, Homo sapiens
gttgccatctggctgtaattttctatgttatcaaggtaggagggagtgtttctcttctagctgttagatagaactgataaaagcaagtgtcctacagcatttcccaaatgaaggcattaggaaatagaaaagcacggtctttttggctccctggtctagtcacattggtactagggtgacctttcacccaagggacagctgctaaagggagtaattcagagacatggagcttctggttatgggtttgttttgggtttgtttttaactcctgcctccacacatgttcttgactgataactgactcatgtccctgaattaaaatgactgacctatgacagcatcaagcattctttgtaagcagagtgatatatctgagagggcgttgacctgttgtgtagaatacatatcctttcccccttcagaatcctgtctcgcctcgtaactgggagagaggctgtgcctgaaactaggggcgatgtcaaggaagctagaggcctcgatgcaattattactgactctggggaggaagacagagaataaggggacaccaactgcccagtccactggccatttttaagggtccccccaccccaagccaaagtttggtttgttgctgttaagacaatttttgttgtatgtatataaatattttagttagaggagcggggaatgggatgcgggctttcacagttctagggaatgggggcagggaggattttgcttttgcttttgctttgagggagaactttagctgactaaaaaaacagaagtttggggtcatgatcacaaaggggccattcccaaaagatggcaagccacgtattcagtggagactaggccaaattctaaatggttttatccatagcaggggagaataggagaatgagtttaagagtttttctcttcttttttcctagaaagaggtaaggataatgggaaaggtagagaaggcggctcccacagaccttttaagagaggcagaatcttgagcttgaggcaccttgagtgcatctcagttcagctggttctggctgaggcctccaaaggcaagctctgtgctttccagtggtttct

SEQ ID NO: 13275 - DNA, 1072 bp, Homo sapiens
gaaatgcattcctgtttttcgtcccaacatgcaaacaactgaacaaaagcattagggcctgagactgggagtaaagaattccttgtcaccatggataccaggaaatggccccacttatatataataagggctttagagatgctggaccatctgatattccagcctggggccacatgggagtgtgccctggtgttattccttatacagttccatgaacatggctctggaaacacctctgtctgcagaaaatgaggcttttctttttttgttcgggggtgaacagagggcagaggcctgggcatcttcactcagcacccctttgtaacccagcacttagcaccatggctggcgcacagcaatgtcacatgtgtgagtgcacacgatgcctcactgccaggggtcaccccacaccggtgctgttgggggcgttggagtggttatctcttctttagtcctcaagctcctacctggcagagagctgcccaacaccgtcggggtggggtgggcgggaagggaagaagcagcagcaagaaagaagccccctggccctcactctccctccctggacgccccctcttcgaccccatcacacagccgcttgaggcttggaggcagtggatttccgagcctgggaaccccggcgtctgtccggtgtccccgcagcctcacccgtgctggcccagcccccgcgagttcgggacccggggtttccggggtggcagggggttcccatgccgcctgcgaggcctcggctcgggccgctcccggaacctgcacttcaggggtcctggtccgccgcccccagcaggagcaaaacaagagcacgcgcacctgccggcccgcccgcccccttggtgccggccaatcgcgcgctcggggcggggtcgggcgcgctggaaccagagccggagccggatcccagccggagcccaagcgcagcccgcaccccgcgcagcggctgagccgggagccagcgcagcctcggccccgcagctcaagcctcgtccccgccgccgccgccgccgccgccgccgccgcccccggggcatggcctgtctgatggccgctttct

SEQ ID NO: 13276 - DNA, 1072 bp, Homo sapiens
gtggaactcataccagaacccagttccatgtatcccatgggtgacctctgccctcatggcctctgcagatagggatgagtattcccatttcacagaggaagagactgaggctcagcgaggttgaggaacttgctggggtcacacagctagtcagtggcagagctgagacttgtacctaggtctgtctgacgccacagcctgtgctgtcattccacatcatgggggcagagctttcgaaagaggcttggaaagtcctgcttctcaggggggccgacgatggctcatttccctctgagccctcactgttattagcctccccaagctggggagcaaacctgtcagttactccacagtgaattgttgtgtctgtagtgaatgttctgggaatttaccattgtatgagctaagaacaaagtccctcgggaagaggctggcctgtgaccagcttcccctcctgccctgttccggtgacctcacggtgaggcccccttgtctgtatacctggaagttcactttttcagctgtcagtcactcactacctgccctgacggaggagagtggaatggtagctaatgcatgaacctaggtagtaattcgtgattatttcaaactggctagagcactttcatctgcaaaacttgatctaatcctgcagggctggattttgagcccagctccatcttcacaagccaggtgaccagagacaaatgtcttacccactcagaaccacatggtcagaaccacgtgatcaggggaaccactgtccctgggttttagtgataatttattgaaacatgcccagtgagcgccaggagcagggcctggcgcagagttgatggtaagcagacgtcattcgcctcacaacccttttcctctgacccgtaaatcaacccatttttttcaagttatagacccatttgagaaactggtttttctaaagaaaaagaaaaataggtgttttcttaactattccaagggattgacaaaaccttaaaaagtttatccagggatctgccaggaatccacagacccaggattcaaaagaaattatgttcaattcccccactgtaga

SEQ ID NO: 13277 - DNA, 1071 bp, Homo sapiens
gagctgacagaactacaggagcaccttgctcaagctcccatattaagtggtagagttagaagtgaaccaaagtcttgattgtggtgatagtttactgggtttatgcaggtcaaaacttatttaagtgatactttgcagtttattttgggtgccattttattttgtgtacagtttattgtatgtcaattatatctcagtaaagctgttaccaaaaaaaataaatgaaccgaagctccactgcaccgtgacttctgcatgttgggctccagttccctgtttacaattgtacacttcgggattttgtgacacatttcaacactggaccgatcagacctctcccttagccattggtctgcactgtcttttctgcccatgacccagtcagtctcgcgccccatgaccctctcctaaaacacgcgcagtctcctctctcttccccttcctctcgtgtcttccttgcctaccagcctcacctgatgggctcgtgttctctccgtccccgatccactcgggctccggcagctgctgcttgggcgccttcggcatcgcggtggcagaactagaaacgagttacagatagaaactagaatatgctttttaaaaaaacaaaaaacaaaacaaacaaaaaaacagtatgcctcaactccttcatactagtaggaaattattatgttcattccttgagtctcgcggcgtcgggaggtcacggcgtcaggcttcccagacagtcgtaaacgccatgtgtttacgcgactggagcaagcggacgccggccccgctccgtcattgcaggccacgcctccactgaaccagggccacgcccccgagatgacggcgaagctcgcacgtgcgcagcccgggggcggggttggccgcgccagcttggagagccagccccatcggggttccccgccgccggaagcggaaatagcaccgggcgccgccacagtagctgtaactgccaccgcgatgccgaaggcgcccaagcagcagccgccggagcccgagtggatcggggacggagagagcacgagcccatcaggtgaggctggtaggcaaggaagaaacgag

SEQ ID NO: 13278 - DNA, 1071 bp, Homo sapiens
agaccttcccctccttcttccgcaccgtgcccagcgaccgtgtgcagctgacggccgccgcggagctgctgcaggagttcggctggaactgggtggccgccctgggcagcgacgacgagtacggccggcagggcctgagcatcttctcggccctggccgcggcacgcggcatctgcatcgcgcacgagggcctggtgccgctgccccgtgccgatgactcgcggctggggaaggtgcaggacgtcctgcaccaggtgaaccagagcagcgtgcaggtggtgctgctgttcgcctccgtgcacgccgcccacgccctcttcaactacagcatcagcagcaggctctcgcccaaggtgtgggtggccagcgaggcctggctgacctctgacctggtcatggggctgcccggcatggcccagatgggcacggtgcttggcttcctccagaggggtgcccagctgcacgagttcccccagtacgtgaagacgcacctggccctggccaccgacccggccttctgctctgccctgggcgagagggagcagggtctggaggaggacgtggtgggccagcgctgcccgcagtgtgactgcatcacgctgcagaacgtgagcgcagggctaaatcaccaccagacgttctctgtctacgcagctgtgtatagcgtggcccaggccctgcacaacactcttcagtgcaacgcctcaggctgccccgcgcaggaccccgtgaagccctggcaggtgagcccgggagatgggggtgtgctgtcctctgcatgtgcccaggccaccaggcacggccaccacgcctgagctggaggtggctggcggctcagccccgtcccccgcccgcagctcctggagaacatgtacaacctgaccttccacgtgggcgggctgccgctgcggttcgacagcagcggaaacgtggacatggagtacgacctgaagctgtgggtgtggcagggctcagtgcccaggctccacgacgtgggcaggttcaacggcagcctcaggacagagcgcctgaagatccgctggcacacgtctgacaaccaggtgaggtgag

SEQ ID NO: 13279 - DNA, 1071 bp, Homo sapiens
tacatgaagaagaacggaatggggatggccaggttgccggcctgggtggggaggctgggggcgggcagggcagggggaatggggtccattcgacctccccgagggcaacgtccacagctgtagccgagaaaagggcaaatgcacgaggggccaggcccatgcccagctcggggtgaaggcggggcactcaggctggtggggcagggggcgccctctctctgccccttcccaacttaaataggcataaataaaaagcgtccagaccctcaggccaacagaggctgccctgcccagccccgttccgcaggctaacactagtgccggtcatcagtcggtgggccagccggccaggaagaggccaccccaggaagggggccggtcccaggccacggaggtagttggagtcagtgtccggggcggcctggccctcacagcacgatccacgtatatcgctcgctgtccgccagaaccttcagggagcaccctacagggacaggtggagacaaagcatagagcccctgcctgcctggccctgcggccacaccctccacctgacttgcttctggcccagaaggttccagaaggcagggaccctgctgagttgccctccacctctagcctgcagctacccaataaatgtagcgtgaatgagtgaccagccaggccatgactggtgggaggctcccaggccccacactttcagggctgctgagctgggcctggcctgggctgccctctcctcaccagccttcccacccatttcatcagcgctcaggaatcagctcctgggtgaggacaagtgttcctggtgaccctgaccatcacggggtcaccgagccccacctttgtgcagcgcctcattggtcatcctgttgacgtagcggccgctgctctccggcaccagccacttcatgaccatgtccacgcagctcttgcggtaggagctccagacactgccgctgcggggccagggggtgagtggctctcgtcgccttggccgcgccctgaccctgccccccagccctgcctcacctggtctgccctttgacctcagtcaggtcgcctacactg

SEQ ID NO: 13280 - DNA, 1070 bp, Homo sapiens
cacagacacatgggtatccagaaaggttgcaacccaagattatgttacgtaaagcagaatgtctggtggccctggggagactgcaggaggcaagccagaccatcagtgatcttgaaaggaacttcacagccacaccagccctagcagatgtcctccctcagactctgcagagaaacctccatcgtctgaaaatgaagatgcaagaaaaggacagtctcacagaaagcttcccagcagctctggccaaaacccttgaggatgcagcgctgagggaggagaatgaacaactttccaatgcctcatcatccatcggcttatgcgtagatcctttaaaaggtcgctgtctcgttgccacaaaagatattctcccaggagagctcctggtgcaggaggatgcttttgtgagtgttctcaacccaggagaactgccaccaccgcatcacggcctagacagcaaatgggacaccagagtcaccaatggggacctctattgtcaccgatgtttgaagcacactttggccacagttccgtgtgacggatgcagttatgccaagtattgcagccaggagtgtttgcagcaggcctgggagctctaccacaggacagaatgtcctctgggagggctgcttctcacactgggtgtcttttgccacattgccctgaggttgactcttttggtgggatttgaggatgttcgcaaaatcataacgaagctttgtgataagattagtaacaaggacatctgtttacctgaaagcaacaatcaggtcaagacacttaattatggcctaggggagagtgagaaaaatggcaacatcgttgagaccccaattcctggatgcgatattaatgggaagtatgaaaataattataatgctgtcttcaaccttttgccccacactgaaaaccatagcccagagcacaaattcctctgtgctctctgtgtttctgcactgtgcagacagctagaagcagccagtttacaggccatcccaactgagaggattgtgaactcctctcagcttaaagcagcagtgacacctgaattgtgtcctgacgtgactatttgg

SEQ ID NO: 13281 - DNA, 1069 bp, Homo sapiens
gagctgttaagaacggcatgactaggcaacttagcaacttagcatttccccttctctctcctggtgccaagactcaggtgtggagggatgagtggggggcaggaaggaggaaagtgagggcctaagtgacccttcagggatcagggactgaggctaggctcaagctgtgtcctcaagctgcggacacaaatctaacgaggaggagctgtgcaggggcaggggactggtacctctgctaacagctgctggaagtccttggcgctaacacagcctcggctgcgcaggatctgggagcagaaagaacactgagcatgactgtatgacctgaggaaatcccttcactctctaagcctcagtttcccctgcttaaaatggggagaggagccccgacctcaaaggatcatggagagaatgaactgcggaaccctgtcaagctcaggacagggctccgggctggtgttgctgtgaggcggcaagctgagcccggccctgtcctaagcaccctacatgcttgttcattccttcctcacaatctcacagggagatactattacccctttacggtgagaaaaccgaggcagagagaggccgtcattcttgtatttgaagatacggtgcgcggcgtgcgcaaagcaaacgaccctggggacgaacttccctcctccactacccctctctgcccactgctccgtagggacgacagcggccactcaccgggccgtagtcccggcgcagctgctgctcgcctcggaagcgcacgtgcagcccatagcgcgccacgtacaagttatcggtgcagaagcaggcgcagcggcagaagtgccgcggagcccccaccgtcgccatagtgaagcacccacagccctaccagcttccgtagagagacttcgggcacgcccccaaccgcgggaggcgcggaaccagcggccaaggggccgctctaagttcccaagggcggaaaaggacgaagacgcacctcgccaggaaacggtctgcggagaaagatgctcctgggccgggttgggaccggcggcctcctcgttccgcctcccagttttcccactacgag

SEQ ID NO: 13282 - DNA, 1069 bp, Homo sapiens
atcttgtattgcctgatgcctgtcaaagatgtaatccatgctgcttaagtgaggttgtgcacacaaatcaccatatctcctgcaagtttggattttgattcagtagttcgatggtggggtttgagattctgcatttctaataagctcccagatgtggctggtgctgctggtccatgaaacacactttgagtagcaagaggtgatctgtagctcagtattggtcctttaagttccctcaaacatatatagagaaaaggtcctaaatattgcaaattctctcaaagtttgtcaagctatattggaattctctcaaagtctgtcaagctctattgtagaaaatcaaatttttattgggaaaaagcctaccccatatttacttacagataaagtacttttaggatcattcaaggcacacacccataacactgagtatgtaagacagaaatgctctctctggaaattacagcagtgctggtgctgggatgccatgatgaggagtgtgtggcccacaatcatgtagaccttgggaaaacctggattaaaatgattttgcgtcatcctggccctgtataagatacatatcagaatgaaaaccactcccagtgtgactttgaattgcttttccattttttcttcttgggattagagagcttcacttagatttcatctaagctgtgatgttgtacgttgacctgatttacctaaaatgtctttcctctcctttcagctctgtctgatctggagctcgcagcccagtcaataatcttcatttttgctggctatgaaaccaccagcagtgttctttccttcactttatatgaactggccactcaccctgatgtccagcagaaactgcaaaaggagattgatgcagttttgcccaataaggtgaggggatgacccctggagatgaagggaagaggtgaagccttagcaaaaatgcctcctcaccactccccaggagaatttttataaaaagcataatcactgattccttcactgacataatgtaggaagcctctgaggagaaaaacaaagggagaaacatagagaacggttgctactggca

SEQ ID NO: 13283 - DNA, 1069 bp, Homo sapiens
aggaagctggacattgcactaagatggctggatttgggcacgtaactgtcagggacagaaaaagtggctgcatgtcagtgacagggtgactgtgttcagtgggccagcgcggaggtgactcagtttgttactgctggatctgatttaaatgtttgtgtaaggaagggtggcaaggggacgcttcaacagggaacgcatagtgtgtgagaaggaaaatgagcaaaagaaaagctaggactaaatcccaaagcccctaaatcccaaaattgggaggtgcgagaggcaggatcaggatgcctccaggatgccttcagcccactgcgccccaccagcgccaagcctgtcccacaaagagtgcgggctggggacgcggctcaggtcgcctctccgcctcgcacgtgaatgtgttgttttggaaaaacgaagccttttgtgttcacttccttgccctcctttgaaacaaaatcctaatcctagagctgccggagcgagactgcggagctccattagaactttccttagggccgggcatggtgggaggccgaggcaggtggatcatctgggctcaggagttcgggaccagcctggccaacatggtgacatcctgtctctactaaaaatagaagagaaaaaaaaaattagcagggcgtggtggcgcgcgcctgtaatcccagctactcgggaggctgaggcaggagaatcgcttgaacctggaaggcggaggctgcagtggggcgagatcgcgccgctacactccagcctgggaaacaagagcgaatctcccatctcaaaaaaaaaaaaaagaaaaaaactttacttaggaagtgtggggagggaaggagggagtggccaaggtcagaggtcagagaagagcctagcaaccagccggcccccgccgtcctagcataggtggagagcgagcgcgtgacgcaggccccgcccccagcacgtgaccgcggcgcgtggggcaggtcgggccgccccctcccctctgatacccattgcgcgccggcctcaagatggccgccttctggcgtctccggcgctgttgaatggcgaaagctttatt

SEQ ID NO: 13284 - DNA, 1068 bp, Homo sapiens
ggtctgaggagtgatgtggagttaaggcgccatcctcaccggtgactggtgcggcacctagcatgtttgacaggcggggactgcgaggcacgctgctcgggtgttggggacaacattgaccaacgctttattttccaggtggcagtgctccttttggacttttctctaggtttggcgctaaactcttcttgtgagctcactccaccccttcttcctccctttaacttatccattcacttaaaacattacctggtcatctggtaagcccgggacagtaagccgagtggctgttggagtcggtattgttggtaatggtggaggaagagaggccttcccgctgaggctggggtggggcggatcggtgttgcttgcctgcagagagggtggggagtgaatgtgcacccttgggtgggcctgcagccatccagctgaaagttacaaaaatgcttcatggaccgtggtttgttactatagtgttcctcatggcgagcagatggaaccgggagacatggagtccctggccagtgtgagtcctagcattgcaggaggggagaccctggaggagagagcccgcctcaattgatgcctgcagattgaatttccagaggcttaggaggaggaagttctccaatgttctgtttccaggccttgctcaggaagccctgtattcaggaggctaccatttaaagtttgcagatgagcttatggggggcaatcttaaaaagtccacagcagatgcatccggctcgaggggccatcagctttgaataaatgcttgttccagagcccatgaatgccagcaggcacccctcctttcctggggtaaaggttttcagatgctgcatcttctaaattgagcctccggtcatactagttttgtgcttggaaccttgcttcaagaagatccctaagctgtagaacattttaacgttgatgccacaacgcagattgatgccttgtagatggagcttgcagatggagccccgtgacctctcacctacccacctgtttgcctgccttcttgtgcgtttctcggagaagttcttagcctgatgaaataacttgggg

SEQ ID NO: 13285 - DNA, 1066 bp, Homo sapiens
agtttccgaagacctattccgtccccaccctcctccccttcctcggagacacctccacttaacactgccttctcagtccctcgccgcctgtttaaacacaacttccacccctcacaaatcagaaagctgtaatttcaaagtttcagaaacgttttcggaaagcctcctccaatgggaagcgacttcgccgctgagttaagcgtccgaatcctccttcccgcggcagggacaccggcccgggccaggtctgcggaggacgcccccgggcgcgcacacacagcccgaggacgcgccctgtattttaagacgcagggtcggatttcaccccgaaacttggctcccacagccccaggccgaactgtgtctggttctcagcccccgagcccgagttctacgccgcaaagagatggggccccattgtgcctagctggcctcctagcacggacgtgtattttcttttggtctgtcttttgctaaaaaccggcagtgcgcttcgcctccctgcccagccgcagcctgccgtcccctagacaaaaagcggcgaccgcggcccggccacccgagccccgccgcgctgcgcctttgttgggcggtccacagatggtgcccagcacggggccgcgccgagggcgggggcgggaggccgcgaagagggtcgggcgggaggggaggagacggcggagcagccaatccgcgcgcggcccatcagctgaccgcctttgcttacaccaggtgcacgccggctgcggggagcacaaagcggggcgcaccgcgggcgccggcaacgagccggtgaacgaggcgaggcccgtgcgcccgcggctgcaagcgcccgcctggcggggagaggggccgacggcgtcagcccgggcggcggcatccctaggcgcctggggcgccttcctccggacctggccgctcgctgccccgccctctgcaccccacttctccgaccctccttcccagtcctgcctccccctgccctggcctctgagagccgactgagcccagccccgtgcagcagcggttgcctgtgtcgccgcctagtctccggtcttggtgctct

SEQ ID NO: 13286 - DNA, 1066 bp, Homo sapiens
tgttacttctccactccacctccccactccctttagaatccttagtttgaagacataattctttaaatgatctgtctcagggaggggggatcttgttacttttaaggactgcaaatagcattataaactttgtttttatttttaaatacgaatatcgactgaagctctcaaatcaatcaatattgttgccaaattttgtaaaacgcactgtcttagctctctaacgatagagttctaatataaatgtaaaaaccaacctatcaacatgttttcaaaaatactttttgtaaagaacagtacaattttgtggtgtccaaatattcctttctttcttacaaaatattattggatctgtccagttcataaatattcctgccctctcttcctccctccctgcctctctctccctgcagtttttttgatgtttgttcttttctttccattttctagttattaattggttcaatggatgacctttgtgcgacactgttataccttatcagcctcgccagggcccccgcgccgcccaatcccagcaactctggttctcctgtgaccccaagccttccagatccctgggtttccccccacgggactgtcacattcttccccgccggagacgccagtcgcggggcctcctccctggggtgtgagcaggtcggcgcgccacacttctctaggtggccggacgcgcgcccagggaggagctggcggcggggcccaggctgttccggctgcggcacgccaggggatgtggttagccctgagcctggaggccgaaggtgggcaggcaacactcccaccatgtttcggaggagaatacactaggctagcctaacgacactcggagtgcgagctgcggctggggtaggggcacccctttccagcgggcgcgtgggtcaccaaggagcagttctccgggacccgttgcgtcagagggactgggcggggctgggcggggcaggacgggggcggcgctcaggaaccctggaacccgctggccctgaggccacggaccgagacgtggtgctgagcccctgcgcggtttctggtgcgtagagactgt

SEQ ID NO: 13287 - DNA, 1066 bp, Homo sapiens
ccttgcaaaactttccagagctacagagtcccccagagaccacgatcacgcagggctaggtcaaggggcaacaaagaactccacatttcaagagccccccaggggtccaaggggcctctccagctgagaaccgggaggcgaggctggcatcctaggcaccgaacacagcgtagcctgggaaggatgtgttaggtctggactctgaacactgtcacctatgccctggcctggccagaacacagagagccccggtgaggaaggggagcaggctttgtcgccagatggcctgcgtctcccctcccacgtgcaggggctactgcctcaagcacaatgctcggacaggccaggggtgcagcacagatagtctgttctcgttccctgcaataaatatttctgcgctaaatcttaaacacatcgaatgttagaagcagcattcacatctcccccagtgccctcctagcggcccaactgtgccttctacgagaccatgcctatgggccccccagctgcccccagatgggctcttatctatcgtacccctgttgtgctacagagcccagagctgcccaagcctggggtggggggtgaggacagcaggaccttgcccctcggcggcccacttcactcctgccgccgcagccgaaggcgacgttaggttttccagcagctgagacaacagccctgccctgacctgaagcatcagtggtgtcagtggtaccccggccacctgtgtgtctcgtgtcctctgtatgtgggggccgctgcagcctggctagtagaagcgagtcccatcggtcagagtcttagagttccaggctgttccaattgtcggtgctcacagagacacgggcagctgagtcccctgttttgcgtatgaggaaacagggtgcactctttccccttggcaccagccgatccgactcttccacgggctcctgacccccatggcttttcgctttgactttgtcacatccaactcaccatgtttctcaggaatgctgaaccagtcggttcttttagccagctatgtaagagcatctgctctctttgattcgaaacacctgct

SEQ ID NO: 13288 - DNA, 1066 bp, Homo sapiens
acagagaggagggtgatgaactgggggagcgcgcgctgggtgggggggcgcggggcctcgccgcggccttctgatgcggccccgcccccacgagggacgtgaagacgcggaccccgcgcagcgtggggacatgtgaccgactgcagaggccgcgccgcctcccccgtccgaggtctgcgcgctccgccgcagggtgcagacccggggcgcccgcctgggtttggggcgcaagagcagaggcggagccagggcggagccagcgcgccgggtcccccctgaatcgaaagcgaaacaggggccggggaggaagggcggagccggccccgaggcaccgccccctgccctgcgcggctgctggaccgacgggcgcacccaggtaggggggcggctgagccgcgcagtgcggaccctcgcggggaactgcgccgccgccaccatgtctcaggaaggtgtggaggtaagcgatggctacggctgggccggggtcagccgcgacagaccccgaggagcggccgggaggcgcggagggggcttcgcagttcctggggacccccatcctagaaccccagatccttacccctgcctggcgctcgccccccttgaaaaggaaagtgactcccacgtttccccagagcgaaatgaggcctccccgaggaaaagcgggggctgcagggtcaaaggtcagaggccagagataacctggccgcccccccacaccttaggctgggacgctcgccccagtccgcgccttcccccaacgccctgtggggactttggctttttccaggaaatgccgtaaagggatgaaaggcggggggggggcggcggaggccaaaaccaagggtcaagttcgggccgggagaacggtgcctagagatgggggagggatgatcccgtttccccttcccccaccggaacccccctgtctccatcccagctggagaagagcgtccggcgcctccgggagaagtttcatgggaaggtatcctccaagaaggcgggggctctgatgaggaaattcggcagcgaccacacgggagtggggcgctccatcgtgtacggtgag

SEQ ID NO: 13289 - DNA, 1066 bp, Homo sapiens
gaagttaactctggggtgagcaaagctggcccccacgttgtccttccgcagaacctttggtagggtaagctcccggggccacttcccgccaacccctccctgcagcccagccccacccgcgcatccccgggcgtggccgagcacggcgcctttaagaagggggaggcgcccaagaggaaagacaaagcccctggccgcgcgctcaccctccccctccggcgcaccacacggacagtggtgcccggatgtcggtgtcgccgtcggtgacagatggcgcagtatctgtatatgcgaggggcttctccggcttgacctctttgagttctcgtcctctccatcccccgctgtcccccacttttaactctgccgtcggaggcccgcacgcctatcacgggcgcttacataacgtgacctttcacctcttcagactgccctctagtgcgctgcaacccaactacgcgacaggggcaggggggcgggacccaggcgcggagcggcagctcctccgagccaataggctgtgagcgctgaccagctctccgcctattggagcattcgccaccggcgccacgggggagcaagttagtgtgtgcgttggccgggcccgggggaggaggggaatctcccgccatttttcaataatttcctccggtgctgctgaggaggagtcgtgactgccggccgccgggacccgaagcggaggtcggcggggggctgctgggaggcgcggcggtgtgcgcgggagctctgcgccgtggcgttccgctccatgactgtcgcgcggccgcgccggcggtgagggagccggagttcgcgccgccctctcacccctcccttcccccaccccacccccgggcgcctggcgctcgctccgggccgcggggcctagtgctgcgccgcggggccggccccagcagccgccagtccccaccgccgccgccgcgatggcgccgctcctgggccgcaagcccttcccgctggtgaagccgttgcccggagaggagccgctcttcaccatcccgcacactcaggaggccttccgcacccgggagtatccttttccagc

SEQ ID NO: 13290 - DNA, 1065 bp, Homo sapiens
gggtgacagagcgagactctttaaaaaaatataaaaaattacctacagtttcttatcagaattactgaatcataatgctacaaaagtccctagagtcatctgtgagtgtttctcagctggatgacgcaagaatcaactaagggttttcaaaaatatgttacctgggcctccctacaggccaattatatcagagtctccaggtggggcctgggcggctgcagctagttaaatctctccaggtgattctgatgttccatgagaggagaacccctgacacccaacctccagtttaaagaagaggaactaacccagggcccagataatgactgtccaggagcatgcactagtggctcccaggggtggggcccaagtcccctgcccccaggtcagcatgctttgactaagaccacagagtctcacccagattccagataggagagaatggtgacttggttccatttcagagtgctttttgctttggtttactcccagcagcaaatgggcagggctggggatggaagccaaacacatagggtgtgtctcccgatacctctcttaaatctcagggagacacagtcaggactgcaatatcttatcagtgcctggatggggaggggactgccaggtaggggaggagagatgtggactcactgccgcccatatctccagtctcctcagcacctagaaacaacttacactgccttataaggctgaaatgctgctgccagagagctgtggggcccaggccttgaattcttggtgcaccagtgcttgacaggctccccttatttcccactggcaccgctgggcctaggggttttcctattgtttttctaaaggcattccaaggccaggacaatgttaatttaagttcctccaggctgaattttttttttttttaattacagaggggtgtcactatgttgcccaggctagaatgctgtgcactacaacaggctcaattctctctctctctcttttttttttttttgtcggagatgagatcagctaataacagactcaattcctgaccttcctagttttctgagactgcatccactttga

SEQ ID NO: 13291 - DNA, 1065 bp, Homo sapiens
atagccgagggagatgtaagaggggaaaggtcttgtcactgtgactgagcggaccgctgtgccacaggatgtgaccaaggccagcccaggtggcacctctcctggaacttcagggaaggctggggactaggccaggaaggcttctggggagaggtgactgtcagttaggcctggaataacgtaaaagttgggtggctgtgaccagaggcgcatctgaggcagagggcagtgtctgaaggcagagagagacacagcctggcgggggcctcagctgggagcagggaaccaagatttgcagggctcttgggggcccgaggaagccgtgcagagggtccctggctcctggcccagctgtggtcccaagtcctgccctgtctcctgaggctgttcctcccctagagctgccagccaagatcctgactgcggacaatcagacgtacatggctgtccagggcagcactgcctaccttctgtgcaaggccttcggagcgcctgtgcccagtgttcagtggtgagtgtctcgtcctggtagtggtgagtgtcgtgtcccagtggccagggagccagggagggcagggagcccaggccagccagtcagagccaggcccgccctgctccctccaggctggacgaggatgggacaacagtgcttcaggacgaacgcttcttcccctatgccaatgggaccctgggcattcgagacctccaggccaatgacaccggacgctacttctgcctggctgccaatgaccaaaacaatgttaccatcatggctaacctgaaggttaaaggtcaggcaacccttgccacatggctggcagtgcctctgggagggagggtctgggcctctggaggacaacagagtgacttccccacgcacgcattaccctcagatgcaactcagatcactcaggggccccgcagcacaatcgagaagaaaggttccagggtgaccttcacgtgccaggcctcctttgacccctccttgcagcccagcatcacctggcgtggggacggtcgagacctccaggagcttggggacagtgacaagtgaggacagtgacg

SEQ ID NO: 13292 - DNA, 1065 bp, Homo sapiens
attcagtagctcagggtttgcagaggttctcaggagcacatcttagcctcattggtggtgtgaggcaggcagggcacaggtcacactgatgaggacacccgggcccagagacatttagcaacctgcccaagggcatctgtagttcagtgagaggtggagctgggactgaaatctaggctgcctgagtcccagagatggtcttccctggacccagggagcactgtatctttttcagggaaggcctcctgaccacaaccatttcatctgtcacagtacagaataggaagtatgggtcaggcatcagaagatgtgaattctggctctgccttttcagagatggccctgcctagttccttggaataaatgatgatgtcttccccagcctcagtttcctacactatataaaaagagaaagcaacatctaggtaggttggaatgggagtacatgaggtggtggccactttgctagggtcacagtagactcctcacctccttccccttgtcttcctctcactaggtaaaagacaattgtattgaactcttaagaaaattggactccagtcccggctccacctttacttccctgggccttggttttcccaccacacaggagtttgaacactttgatttctgaagtccttcccacctctggggttccaatattctgctccttttctcctcttcctcctccccctcctttctcctcctgctcatctggggttagggagattgcgtgtatgtgtgtgcctgtgtgtacacatgcatgtatgtgtgtgcacgtagtggcagcaaggaagaggaaggaaggagtcctgcaggggttggtggtggcagttgggagaaaaggaggcaggactgtatgtgccagcagggctcagagttttctcaccaactaatggtgcttggggcagtttaatcattaaaggaaaggaatgaagccaggagcgcctcaaagtccagcctgctgttgaccaacactaacagatgagcaaggagctggcagcaatggggcctggagcttcaggggacggggtcaggactgagacagctccacacatagcactg

SEQ ID NO: 13293 - DNA, 1065 bp, Homo sapiens
gaattttcttttacaggtcggggatccatggaaggagggtttgggattcaccacagagatatgttctctgtcctcaaagaatcaaatgtaccattcctttaaaataagcataaattgaggagggactggcgatgagagtggaaactagctatagaaatgggagcatgcagccctgaattgctccagaacaaacacatttaatgccagggaagtagaccacgctgggtaatgtcacaatactataaaaggaagggtacttgctaggtcctattctaggatattttttccagccctctctctaggctgctggaaggacagtgaggctggtttaggtgctctctccctcctctccaaacacggcaaacattctgggtggcttcccgtctggaagcctgttgcctgatggcatcgccacattggcttgctccaccgctgcagctcggaaggcagggttaattccatacggttgccagagccctaaatgagggagcctaggtcagaggtcgcacccaccgggagggcggggtttaggggtccggggcgggctgagcctggccccgcccaaggagggggcgggacgtttcccgggccccgccccgccggcccggggttgcacgtgacccgcggtcccgcctcccgcccgctccgcagcgccagctcggcaggcgcggggcgtgagtgtggagtgagacccgccgggctccaactccgcagcgtcggagcgcggcgggcagcaactttctccccggagcggccgtggcggcggctgctgccgtggcagccggagcggaagccgggaggaagaaagcggcggcagcggcggttgctcccgccggctcgggctgtctagctcgccgagactgccggcccgcggagccgcgtccccccgggcagccccgggcccctgccctatgtcccgcaaggcaagcgagaatgtggagtacacgctgcggagcctgagcagcctgatgggcgagcggcgcaggaagcagccggagccggacgcggcgagcgcggccggggagtgcagcctcctggctgccgccgaatcgagcaccagcctgc

SEQ ID NO: 13294 - DNA, 1065 bp, Homo sapiens
cttcttgaatccagtcctgtgctgagaaatgagactccagggatgaatcagatcagtcctgctctttttaatttttatttatttattttttaagagatgaggtctcactccgctgcccaggctggtttcaaactcctgagctcaagtgagcctcctgctgcagcctcccaaagtgctaggattacaggcatgagcccccacacccagccagtcctactcttgaggagacactagtttgttgggaagacagacctggacccaggcaagggccacacagtgtgctcagaactacatcagaaatgtcagagaagtctttcttgaagaggcgacacaggctgggtactgaaagctgagtaggagttggccatttgggagacagggaagtgctctaaacagaagacacagtttgtgcaaggatttggtggggataaaatatctggtcaaaaaaagcaaaaagcaaaaatctgggctgggtaggttaaaggagtgggaaaggatttctgatttcctctagatttggtttggagaagcagggggaaggatgagcgggaattggggcatgaccaggattggaaatcaggctgaagagcttgtactaagagctatggagggttcctgaggagggcgagtgaccctgtcagacttggatttgaaaatgattcctctggattagttaaatccaggggtgctagcttagctaaggaagcgatgcatttttagggagtaaaagagtgattttgagcctggagcacaggggagagggcggatgctaaggcccaggaaagagtgctcttgaacttggaagggcccagctccccaagaccagccttcagccttgatatgacctgattcagctaaacaaagctggggagcgggaatgagacctgggggacttgtcggctcagtgcccctgaggtaaccattaatccttcccctgggggaatccaggggctggttcctggatggggcagatcctggggagaatggaggagcacacagaggcaggctcggcaccagagatgggggcccagaaggccctgattgacaatcctgctgacatcctag

SEQ ID NO: 13295 - DNA, 1064 bp, Homo sapiens
ccgggtcagagacctcagcccgcgccaaggcgccccacactttccagcgcagcgggtcgcagcccggagacgccgggcgtccccacctccagcctcccgagctgcagcggcgcccgcggttctcccccgacccgccaggtggacccggactggcgcaccctgctttccgcccgggaccctcccccgagccctggctgcctccgcgccccgccccgcccggagcccgcagccggcgccccggattacctgccccggagtcacagtccgcagcccggacgctcccagggtggctccgcggagcctggagccacattcctaggggaggggtccccacctagagggtcgcggatcacgttacccgcccggaggaggagaccgcgggacacagagtaaacaaggggtaaaaagttgcatttggctcaatttttttttttaaatcgtgcttcgacgctggtggactcggggacacggcgtcctcccagttcccggagcccaacggccccggggcggtttcccagggcagaggcacctctccgggcggcgggtgcggagctggtctgcgcggcctctgaaggcgaccccggccgctcgcgggcttcctggaagcgcggccgcaggagcagaaacgctcacatccacgcgcacaaataaatccgcgagcagctccgcgccgcgccgcgggcggcaaggaaacctcgggttgattcaatgcagacgcggggcgtctgcccgggcaggaacgcggcgaggcgagaggaccgggcgtgggggcagggaggccggggcaggagaaagggagaaaaccccaaagccacgttttaaaaatgcgggtgaattttcaatgccgtcagcccgggggaggggaaggggccagctgcgggcgccggggtcggcagtccacccggggcaactttccgggcgggaggcgcggccggagggggcggcgccggcggcgggaggcgggagtcgggggccggggggagtcactttaaaggctctttcttacccataatgctttgtggggacgttgacaagtggatccaagatggcgtagaaagtaatga

SEQ ID NO: 13296 - DNA, 1064 bp, Homo sapiens
taatggatgggaggagagaaacacagcgatcacaaagggccatgtttgccaagaaataaaatatacttggaaaaaaagtacgtatgtgtatataccacaaaactcgggtgcattctctagggaccggcgaagccattctttcaggagatatgctcagcatttgccacgggccagctgctgttccaggtcgtgggttagggcccggcaccaggaagggcgcccctcccacagggccgacatcctaaccggcgtcgctgcggccgcggagctgggaaggccgagggcgccgggcacgtctgtgcagatttctttagagtccaggtctgtcgcccgcgtcttcgtcggtggcagcagggctgactggccacggcggccatctgctagagcgcatttcttcccatgaaacgccacctcctccgaagtgcggagcgaacgcagccaaatctacacaaagactgacaagctggatccactcgacggaacccagggccaaaaaacggcggcgagcagcgcctcgggcccgcgattaccggttttctgagcaccggacagcgtgagccgtgccagccctgtctcgccatcccagccgaggagggcagcgcgatggctcttccctgccttgaaatcaaccccattgccagccgctttcgccggcagagcattttccgtggggtccatccggctccaaggcggcctgcgctggccacgtggaaagaaacacgcccactgcctacaggccacgcccttcctcccttcgcgcatgcgccccacccgtcctgaggacctccgaacctgcagggggcgatgaaagtaggcttgcgctccgcttgtagctgcttccgggtcagaggtcagacggtctagcgctgcgtgggccatggtgcagctccgaccgcgagcgtctcgcgccccggcgtcggcggaggcgatggtggacgagggccagctggcctcggaggaggaggaggcggagcacgggctgttgctcgggcagcccagcagcggcgcggccgccgagcccctggaggaagacgaggaaggggacgatgagtttgacgatgagg

SEQ ID NO: 13297 - DNA, 1063 bp, Homo sapiens
attggattggagtaaagggcaattgatcacagggagatcattctgaatcaatcagcagaagttagaaatttggaactgtttctgtggacctggaaagtgatccaggctcctgctgtctcccggcacttaacttgagccagaaattgtccccatattgggtgaactgtatggctcagaggagctaccggtgtcagaaaccacaggtccctgcaatttccatctcctcttaattgttggattaggccattcttgaattaccataaatacctgaggctaagagtaatttatttttaaaaaatatttaattggctcatgattctgcaggctgtacaagcatgatgccggcaactgctcagcttctggaaagacctaagggggtttttactcatgtcataaggcaaagtgggagcaggcacatcacagggcaaagccaggagcaagagagagagtagggtggggaggtgccacactttacaacaaccaggtctcacaagaacttactcactattgtgaggacagcaccaagccgtgaaggatctgcccccataacccaaacacctcccgccaggacccacctccaacaataggatatttcaacatgagatttgagcagagataaatatccaaactatatcattctacccttccctctccaccgtccccgccaaaaaatctcagatccttctcacgttacaaaatacaatcatgccttcacaacaggtagctaacagtctcaacttgagccaagaaaatggggtctggagacagagaacataaggctaattcatgctggcttcctagaactaaatcaaatggaaacacttcagctatgctaggaaatatcttctccatttacatagggtgtacacctagtaaatgtctttgtaactttatcctcttcatttacatagggtgtataccaagcaaccaatggaaacctgtaaagggtatttaaaccccagaaaattctgtaacggggctcttgagcccctgtgctcggggccgctcccatcttgtggagcgtactttcattttcaatagagctttgcttttgttgcttcat

SEQ ID NO: 13298 - DNA, 1062 bp, Homo sapiens
cctataaaagctcaatgaatggggcggcagtgtcaccactaagcccgaccacgctgctactctgatatccaacttccagcctccagaacagggagaaatacagttctgtttttgatgagctccccaggccgttacagctctttctttgctgtaacagcctgaactagcccagaagtgctattccatcatctgtgtcatattccatcattcagaagggagtcactaacccctcagtgctgtctctgtggacgctgcccaccctaggctgagatgaggcacagggtctgggtctaaataaaatgggaaggcactggaaggtgcaatgtcataggaggaggatgtctgaatttcatttaatctcaacctctactggtgcagcatgaaagatgaggcccagagcaaaagtgtcttttcccgagatcacactgtggaccccaggcccactggagttgcattagacgttacctctcaccccttcttgtatttgttccatttctaagtgtgtgcaatatccacagggaacaccacaccatgagtttttaaatatttatctcaaacataacctcatgagttccctaggaaagagatgctagcataacccccattgtgcatgctggggagaccccaaaacaccaaaggagttctctagggtctcacaactgctaaaataaaggctgtttgacccagcactgtctcctcaaacctgggaccctggttatatccaggtcttcccaaggtgctgaaggggcacactttttcataatggtgactacgtaaggagttgacgggggagggtgagcggtcagaagcccagaggggcctttgagtaggacttatggaaaggaggagcttacaggatggaacctacaagatgtgacctcacttccttgccgacagacccccaacagaacttacaattctggtaactaggcacccacattctagagacagccccatttccagctcacttcgtaggcgatgctcgagagaacaacatgttctcctgctgtatcccgacatgctgccgacctcctcgtcgcacaagaggccaaaatgagagtc

SEQ ID NO: 13299 - DNA, 1062 bp, Homo sapiens
ccagcaaagaggaagaaatctcagtccaggggcaacagccagctgctgctatcttagatggttgaaaactagacgggtggctcactgccattgtcaccaggttggaactcttgcctctgtgaggatgccttctctactgtgcatacccatgaaatttaatacacattttaaaacctctggccactgagtatttttgagggaactgggtgctgcctttgccgctttaagggtaaagatgggaggtgggactgggatcttctgaggagagggaatggttgggtgctactgagaaataaggtcagttttaggctcctgcatccttgggttttcccaggaagggaaagccctggagtcagagctaggggtgattgaactccggggagaggagggcaatagaagtgtaggggaaggcggggcacactagctcatgcctgtaatcccagcactttctgggaggccaaggcgggtggatcacctgaggtcaggtgttcgagaccagcctggctaacatggcgaaacctcgtctctactaaaaatacaaaaaatcagccgggtgtggtggcgggtgcctgtaatcccagctactcgggagactgaagcaggagaatcgcttgaacctgggaggctgaggttgcagtgagccaagatcgcgccactgcactccagcccgggcgacagtgagactcggtctcaaaaaaaaaaaaagtcgtgtaggggagatgggcttgccaccagaacccatggggtactggaggtcctgggctttacgccaccccggctggagtccaggcggtggctcccctcatcacagggctcggcctcagacccggaaaggtccagggtccggcctccaattggagcctgtcattggcttcccctcggcccgccccctgacctctgccccgctgccgagccgcctgattggtcggctctgtcccgccggcgccgcattggctcttctggctcgccttccatccctgctcctgcaccggtctgcatctcccagcagaaggcgcagccatgaatccgttattcggccccaacctcttcctcctgcagcag

SEQ ID NO: 13300 - DNA, 1062 bp, Homo sapiens
cttccatttcagctttccagcttccccggtagctcgggggcggctccagctttagaaatgccgccggcccccggttccggcttcccggctctgccgccgcggccgctggggctgctgttaccgccgagccgggcgccgcagcggctcctcctggggcctacatttgccccgccagcccgtgtccggagcccccttcgcgggttacataaccaggctcccggccgagtgggcgaagcccagcacatttcgggggcggggggcaggggagggtccccagatgtcccttcagtgcttccgaagacaccggaggggagtaccccgcgtagagcgcagctggaccctcggggtgcgggcccctctccttgtcctgcttttcagcatctttggcaattgcgcaaagttgcttgggttgcaatggtggggtgcagggggcgctcggctgctgcacctgttagtgctgggcccaggttgagaggcgacctccagcccccacaataatgtcccgggctctctggtttgggtcctcgcagcgcccgattgaccgccagcgatacgacgagaacgaggacttgtcggacgtggaggagatcgtcagcgtccgcggcttcagcctggaggagaagcttcgcagccagctgtaccagggggacttcgtgcacgccatggagggcaaaggtgaggcgcccccaccccgggccgccctctgcgctgcgggccgagcgcacgtggggagggagctgccggtggctgggttcgtatttcgcgcccgcgtcccccattccaggggatccggtgacgaaacgaggccgagcactgggggggtggggtggggtggtgagggaggagggcaggcagtaaggggggccgggcatgggcctaggcccggcccgcgcccaccaccagccccagggtgggcagagccagggggccggcggacagagggacctggagatggacaggcggaccgagggagggcgggagcgccgcgtcctccccctccccgagccggtcgcgctccctgcgctgcctgaggtgccgccgcctggctggaactgggttcag

SEQ ID NO: 13301 - DNA, 1062 bp, Homo sapiens
gcgctcagacgttctagtacacagcagggattctcaactctcacgctcagtcgttctagtacacagcagggattctcaactctcacgctcagtcgttctagtacacagcagggactctcaactctcacgctcagacgttctagtacacagcagggactctcaactctcacgctcagacgttctagtacacagcagggactctcaactctcgcgctcagtcgttctagtacatagcagggactctcaactctcaggctcagacgttctagtacacagcagggactctcaactctcgcgctcagtcgttctagtacacagcagggactctcaactctcaggctcagtcgttctagtacacagcagggactctcaactctcgcgctcagacgttctagtacacagcagggactctcaactctcacgctcagtcgttctagtacacagcagggactctcaactctcacgctcagtcgttctagtacacagcagggattctcaactctcacgctcagtcgttctagtacacagcagggactctcaactctcacgctcagtcgttctagtacacagcagggactctcaactctcacgctcagacgttctagtacacagcagggattctcaactctcacgctcagacgttctagtacacagcaggtgcgctgtcctttaacaaggacaaaggtcaacaaacgccccttggatgaatggctgattggcaggcattccacactgcaggctctgtccccgcccagcagacttgtcccctatcttgaaacactacttttccatttcattaatgcaacctgatggccggccactgtaacaaaagaaacatcaccaaaatgaattgtttctttcttaagacaaaagggagtttgctcctcacatatgaccttacgcagtttctgtctgagaatcatcatgttcgtcagccctgcctgtgctctcctcttcccactgtgcttcctcctgcatcacaaaggaaacccctgtgagcctgggaagtgggtgcgcaggcggagaaacagaaacggccactccaggctcaacctatccatc

SEQ ID NO: 13302 - DNA, 1061 bp, Homo sapiens
cagtttcctgtatccagagtgccccagatgagatagatgctactcattctctatatactcttgagtaagtccttcctctctctgggcctttgtttcctcttctgtataatgagaaatgtgtaaaagattgcatctgaggacacttccagctctgccatgccatggttttatcagccactaacaacttgatgggagttggtttatctactgcttctagctatgaaaacttccagaaagaactcatgggaatgtgaccccgtttatatataataataaggcctttgtttgcaagtggcagagaccaactcaacataccttaggtaaaaaaggagaatttatctatagggtatggggaagtggctgtcatgggaccctagggcaggaatagagggaggcctcaggaaaggactaagactaggcatgggaaaccttcagggatcatgctctatggattggatttaggtggctggaggatggggtggctggcttggggactgaacagacattgcaaaaagtgtcctctccacctgggttgttggttttcatttggggcagcagtcacagaagtgtggggaatgtgggcctgtccagatgtggctggtcctgaggggtggtgttgttgaagttctctgaccagtgggtatcaggatggaggggatgtggatgcaaaaactcctggggatctgagagaatctgaaagaagaaggggtgtgtgcatgtgtgtgcgtgggtgtgtgtgggtgtatgcgcatggcggtgtgtgtgcatgtttgtggatgtgtgtgcatgtgtgcatctgtgtggatgtgtgtgtgcatgtgtgtgcatgtgtgcatgtgcatgtgtgtgtgtgtcagccaaacttaactctgagtaatactaagaaaacccattttcttggggctctttccctgggctgggactcagccttggtcattggaccggctcccaaccaaaaccacaccatagggttttctgctcttggccaacccaacatgagaaaagaggaattaaatggtcctactaataagaaagcctcagcgtagcattaagggacgtag

SEQ ID NO: 13303 - DNA, 1060 bp, Homo sapiens
acattcccacagcaaaggacttagattcctgggcagagagaggcaaatttcagggctctggttgggtctggctaaggtccacctggcctcggggctacctaccgccttggccggttttttcctggtcagagcgtcagaggggtgggaatctgacttgtccagagccagctgggaaaagagacggttagcaagttcagggaagggacttccgctgtgtcaaggggagaacaggcgagagccgcgcggggaggcggcgcgaagcggtgacctttcccctagtttcgccctagggcaccctggcttgccctttcccctactttcggcgactgagcagtaggcaggtacctggcaccaagagggagatccctgccgatggcgggcgccgaagcggaccgccgctcccacacccccttgccaaggctgcggtgacttacctgagcggcacccccggcatagggccgccgggcagggccgggccggggctgccccaggagcgccgtgagccgcgagctgtggggagtgggggttcagtgccggcccggtgcccagggccgctgcccaccgtccctcttgtcacacacagaccttccgcccccgagcctcagcagctgccgccccaagctcgcggccatccgagccgcctgcatctccgaatctctccgggcgccgctggctcgagctctgacccagctctggcgtcctgcacgcccacgtcctggcgcccctaaccctgactcatcgtccacagtgcaccgggcggcggacggttgcgggccccggggcatgctgggagctgtagttccctggagcccggccctgcgttccgctgacttagagggatctccaagcgtccctcgtctcccccaaactccttaatcccgcccgtccgacctagagtctagtcctccgacggggtgatgggataggatgggacagaagaggaaggggcttaagtcactgcagccagagggatggaggtggactgaagggagggcttctccggtggggttagaagggaaaagtagggaaagagaagtgtaaggtagatggcagaggcaga

SEQ ID NO: 13304 - DNA, 1060 bp, Homo sapiens
atatccaatggagactgcaggaaaaatgagccctggggctctgtgcctgtggaggtggctgtgtgaaggtgggaagctgctctgccccgactagcgactgctccttccgatgttttgaatttaaagatggtgaaatctcaatctgaaggactagagatgggcgctagcgttcctgacctctgccctgttgtcctgcacaaactagaaattatgttctgggtccttgtctttttttgggggggggcgggggtcggagttttgctctgtcccccaagctggagtgcagtggcgcgatcttggctaactgcaacgtctgcctcccgggttttcaagcgattttcctgcctcagccttccgagtagctgggattacaggcgcgcaccaccacgcctggctaatttctgtatttttaatagagacgggtttcaccatgttggccaggctggtctcgaactcctgacctcaggtgatccgcccgcctcagcctcccaaagtgctggaattataggcgtgagcccaccgagcttggctgggtccttgtcttgaaatgtgtctctgagccattagccagaagggggcaaagaggcctggagggcagctttcccccactccccctccgttactctctgaatctgagctccaggtttgggcagttgaggtttagcctgaggccaaggacgaacgtgatggggtacaggagaagacttggcggtggagggggttttgtgtgcacatttacagagtcaggggcattcccagtccagaaaggattctcagaggcagtcacaaaaaggaatggggtggaagggctgagacttgagggagggaagggtggtgggggtagggccggggtgtggttgggtggatcgggttgatatttatatagggataggttgatcttggaaggctggagacggcaacgtggacaggaagaagcggagggcgaggaggagcagaggagcacacagatgaagcaggtgatgaaggctttacaagcggggaggcgtgggctggtgacaggcggagggcggggagcgattgcctgcgtgtgcatagatct

SEQ ID NO: 13305 - DNA, 1059 bp, Homo sapiens
tcgtgaagatgtaagatgctggagaaaattgactcaaagacaccccatacacgcacgcacacaggaacccacatccgaacaatgagcgaggtaggagctggggagagtggcgcggggtcaccgccagatgcggggtgtggcaacctccaggcggccaaagtctctgacttccaggttcttctgtttgcttactccctatccgggggcccaaggcgctgtctccgccgcccaagccccgcgtaaacctgggtgacctcggagacatccgttggagcatgagttcccgacatcaggcggcggcggtggtccgggagaaacccggcggcggggagataagcctgcccaggaggcagggggctgggctagctgccccgccccgcgcctgacttcgttggggagggagacgcccggctcccgcccctaactagcccagccgcgcggagcgcctgggagaggagaaggagccgacctgccgagatggaggcgaccggcacctgggcgctgctgctggcgctggcgctgctcctgctgctgacgctggcgctgtccgggaccagggcccgaggccacctgccccccgggcccacgccgctaccactgctgggaaacctcctgcagctacggcccggggcgctgtattcagggctcatgcgggtaaggggctctggggacgtcctggctaggggtgggaggattcctgggagagaaacccgagtgccagggtgaggggcttttcgggtatcctagggaggaggcaggggcaggggtcccaaggcaaaggggctgctgctgtcctggggttgggggcaggagcaggttgtccagggctgagaaggggagaggtgcccgggagagaggatcgtggggtgggggaccagggctaggaggggcagagacctctgcctacagaatcctgggaaggtgatgggcagggaccgaggctgaaagagacaggagtcctccagccgaggagaagctgatgcagctgggcttgtcccagagggagaggtagctggagccatacaggtggggcatgctgaagagggcacaaagaagaaa

SEQ ID NO: 13306 - DNA, 1058 bp, Homo sapiens
ataggggaaatctgatgggtgttggcaaatgattaacacaagaatgaagtggcatgatgaatcaaagatgacttctaagtttttatcttaggtgaaccaaagaatttattcccttgaccagaaataaggcccctaacagggataaataatttagtaggtggaagtggatgagtttggttagagttgatgattctgaggatatgatgagatatcgaggttagaaacatgggcctaggccaggtgctgtggttcatgcctgtaatcccagcactttgggaggctgaggcaggaggattgcttgagtccaggagatgaagaccagtcagggtaacacagtaagatcctgcctctacaaaaattagccagacgttgtggcatgcgcctgtagtcccagctacttgggaagctgaggtggaaggatcacttgcactccggtgggcctagacttctggtgggactgggagtcgtcagagtgtagggtagagttgttagagtatggggtagaccaggacattttggaccaagcatcagaacacatggaaccaaatgtttgacattgagatcaacccatcctgttagatacctgtagtagtggttcatctagacgccttataggagaatcaaggatgccccaggaaagaagagagttagtgagagacagaggattctttcccccaaggatcaggtggaagaatacctccagcaaaggagaagtaaagggatcatggaccagagagaagaactagacttgtgctgtatggtagacctcattgatgagtccctaccacatgcaagactgtgaaagattatagagggcagggtggccatgggatagaggatcctgagggattttatagttcagaggggcaaacagccagttgtcaatggctaaatgtaatactttgaagaataaaaaaatgctgaactggacttcagacaacacattgtggaaatgcagaagcaatagcaattaatcctaacgatggaatgagaggagatacgatcccagagactaaaggacatttttcaaaggcaagggaaatggctaactatggcat

SEQ ID NO: 13307 - DNA, 1057 bp, Homo sapiens
agttggagaatgcagcagtgaatataaaattgcaactgcattattgtctccggggtttcaggtaacatttacaactggaaatgcagtttcctagataactgtaaacatattttgacattttgtttgataatagtggtgacaaaagaatataagcctgtctttaaacatggtcttctctccatacatttcactttaccacccttcagccaacctaagcgatttttcaagaattagggacgctgcaaaaaccaaagcgaagagctagaaagagtgacaaaattagtaaagatgtctgtagtctctctgtgtgtgtgtgtgtgtgtgtgtgtgtgagactgtcccacgagcaacagaccaaaggaaaactgccccaaggtttgcgcaacagagaacaatcagcaaagttaaagtccttacaggacagaaaagcagtaaatcttacagctgaagcctcctcccaggggaaattaacgtctgtagtttaatctttccttaattcagaagggagtgaagataagaatatgcatagggaaaatggagagaggggagcgtgacattgagttggaggaggtaagagagtattatgagagacaagatggggttgacagatttagcagatacaatatttgggacacacgcacgaagagatgattcgttgtttatgtaaaattgaaacttaactaggtaggcatcctgtatttcatctggcaactccaggaaaagagaaaaatacagtgttactccaatattcccggttgtgtaaggaaaacaatcaaagctcggccctaaggaaaaacaaataaaagaggctgtgcgaatgcatccgaatcttcaaacagaatccatttccggtctggggccctgggaaaacaagaagaggagagacaattaaggtagccgaattcagtccgccagtgtcccataatcctcttctctcggttcctctttcctcgctcaagatggcgctgctcgcgatgcattcttggcgctgggcggccgcggcggctgctttcgaaaagcgccggcactccgcgattctgatccggcctttagtctc

SEQ ID NO: 13308 - DNA, 1057 bp, Homo sapiens
tcatactctgacccttgggattctaaagaacaaagtgtcctatactcttaaacagatgctcatctgatgggtctgacccagtttgaggtcatgcgttgcccaaccagtggtccggagcctggcttggcttgagaagtgtccagacgcaggctgggggaagtcagaggcttcgcaaacaccagacatgtttgaccccaatcagagggtcgtgcaaagcttgtgaccccgggcctggggttccctaaggagcgagagactcctgtttctccatgtgccagccttgtgctcacaagctgcagaatcaggtcctagaacgaagctggccacctctcgggacagggtaaagagatgcccatgggttggctgtgcagatttcccagaagtgggaagaacctggctgtgtttttgtggtcacacattgatttcctaacctgagtcagcatggctgcttggaggtacagtatgtcctctctgttcccaggggccctggatcccagcctggctgaagcatttccaaaacagggcctggaatagtgagggaaacggaaggggtggagatcccaaatcccctccgtcagtaccagccacccaccgttgtattaaaaacgcccagcatggactgagttcttaccaggtgccaggtcccgtgctaagcatgtcatatgtattcacttaactaaccttacagagatgcaatggagtagaggctcttccatttaacaaaggagtaaacagactcagagaagccacatcacttgtaaatggtcccacggagatggaatttgcaggtctgtgattgtggaattctggagtgttagctccgcaaattcactacttcactcagccctcaccacaaacccccacccagtaaggtgctgccacccgcagtaaggatatgaaaaaactgaggctgggggtggtggacatgacttgtaagatgtttctagaaagctctgctgtgacaaccagtaactgttttttaaaagcccagtccaactctctgggctcggacctagttcgcggtgacatggccaaacctaccaagaaagtcgggatc

SEQ ID NO: 13309 - DNA, 1056 bp, Homo sapiens
ggaggtcttcattcacttgaggatgcgccttctatgtgcgccctgacactggacaccacacagcgctactccaccccattcacaggggggaaactgagtctgggaagcgccgtcagagccacccatggggtcagcctgtcctctgtcgctctctacaggccacgcggaggaactgccccacctcccggggcgccccagcaggtgccaagccacagccgcagaaccgcctgatcccgaactccctgtgcagagaccagactcgcccgaatatggggagaaaaacgagccgcgtgcagcaggggccgcctcggtcccctgcctgctccgctcacggcgagcgttcctggggcctcgagtttccccccttccgctggctgctcggaatcgcgggacggacccacctggccgccctgcctcccttccaggtgggcaccacctggactccaagtgctggtttacaaagcacacaggagacccttacgggggtgagctggcccctcgccagcgtccgctcggcgcgccccggggacagtgaaggcttggggcgcctctgcagagtcgccagcgcggtgggcgcagccggatgcctctgggagaagagcgcagcgcccgagggtcccccggcctacgaaggctaagccggggtctcggattcgatgtgggcgcgtcgcgtgacgcccggcgaggggcggcccggaggcttcccggcggcggcgcgcgcagggtctcgggcccgggtcggtcccgggcgcggcgcgggcggcgggcgcctcctggcgggcgcggacggagcgcggcgcctttaagcgggggcgggcggggcgcgggcagagtcgctgtcgccgcggccgccggggcggagccagcgcggatcgggtcccggacgcccgagcgccccgcccccgcgcgggcgatgcccagcggcgcggcgggctgcggggcccggcggggcgcgcagaggagcgggccgcggcgctgaggcggcggagcgtggccccgccatgggcttcctgcaccagctgcagctgctgctctggaagaacgtgacgctcaaac

SEQ ID NO: 13310 - DNA, 1056 bp, Homo sapiens
accatcctgaccttcttagggacgtgcctggaaccacctcgtccacgtccacgtccacctgggggcctcgggaggctaggcccctcctcaaaggcccaccagcccggcgctcatgctgagccccaggcacgcagggccggccacctctctcctgaagccattggccgctcctccacccagtgcttctgcccatgcctgccccagcagcccctctgcacggtcaccatcgcctgggcctgcccacagcactggtgctcacctctacctcctgtcctcaggccgtgcggcacgacatggccagcacgcagaaggagccctcccgggacccaggaccccccgtggtggactccgcggcacatgcttcccaaggtggtcccacggagggtgttactgggcaccagtggactcgccccatggcccgttcctgggagatgagggccgtggcctgcatgaactaccagatgagtaagggaaccccaggcaggcggccctgccacagcccccaaagacactggcctcctgctccagcttccctgtcctggccccacctgtcctgttgctgccagcagggcccttgtttgggattatgaacaaacctcacagactttgaggacctggatggtcctgcattcacggcatcaacactacccgcgctgctgttagacactccgccattcctggttctctccgaaccgttctttgtacagtaaatgtaattcagctgtggtccccacgttttgctgtgtctggtggggtgggtctggcagtggcggtgccccgtgccaggggccagtgctgcttcatacccggcaaactgacctctggcctttgttttgcctgctgttccctgcgctgaccgggctgacctgccgcggttggctgggttcgcctcaaagtgagggctggagctgggctggagcagctgggcctggtcacggccattctcctcttcccggtggatggaatcccagctgggctgtgctgagccctcgctcacagtccccggcagcagatggcctggggcggactgtccccaacagcagcaggactccagag

SEQ ID NO: 13311 - DNA, 1056 bp, Homo sapiens
aaacatttttatgacctccgggtgatttgtgtggggaagaaggaggagcacatgcatgtctctctctctatatatagtattataatgtgcatcatcttgctgtacaaaatactgtcattccaaactgccaatgattgagatgcaaaattacagttacaaatggcattttaggaactatttttaggttgtcttcaaggactatgttattaatagcaccagtttgcatttcagttgcttttctgaatgaagaaaagagataaatcttcaagcttgacttgctcatcaaccaaccatttcatgatcagagtacatttcctttcactaccttccttttggaccttaccttcttggtaaatatttctggggtgttttgtttaatccagtcagttactcattcactgaggcagtctagtagcagaacaagctactagactgaatgttttcctattggaaagctgcaggtttagcctgagcacctgacaccttagtaatgaagattgattcagctcaccacctacccaatctctctgccttctagcaatggacttgtttattcagaaaattcttcctttttccttaaaaaaaaaaaaaaaggcaggggcagacttaatatgctaccttaattttttaaaattttctttgaacagactttaaaggggatgggggagtagtgttgtaatcacttgatttttcaacacccaagtgtgtgctctttctctgtgggtttatttcagtctacaacttaaaactagactgatgaagaaccgactgatggagctgctctacacccttcaggcaactttctgtgaccactgtttctcatactcaaacttttaataaagcttgaggttttgctcttcaagaaaagatcatccatgttactcattaaatgcagatccacatgattgaacaagcactgagcagaaggccaagcagccagcctcttccaagaaataaggcactttgctagaacttaatctgaatggctcatacaaggaggtgggaacctcagaagcccagaatgattcttttcattttgcatgtgaccctccatac

SEQ ID NO: 13312 - DNA, 1055 bp, Homo sapiens
ttcccaggacttcagttccataaggtatcatctggtcgaattcttatgtagaagttgtctggttcctcagtttcacccattctatggccagcccagacttccccaggtaggatttatgccccttcttccagaaagcaggacttctcctgtcctaaatccttcattctctccatctagcagtcaaataaatcccaggaaatacacggagtgttccttgtcctgaagtataatacccatccttgtaatatactacatggccttatctttatccttacatttaggaatttctaatatttctccctcttttgttgcttcaggtgccaaataaaacaaaatgcttcatcaaaccaatgacatacatcatgtgtcaagtatctgcctcaaagcaacttgttgcatactctttacttctatatacacgctcgcagtttcttaatatttactagaaatcagaatgcaattctttaatttttatgttcccctttgtacatcatgtgtcacctttaattctttgttcatcttagttaccatgaagtttttcatttacttacttgcttcgtagttactttgaagagtaaaacgtagatgagatgcagtatactgttaaggttttctaataccacggggagcgtttcatttgtttttaaagtttaggccattgcaagaaatttgctccttaaaattctactgacacttattcttaatttttttaagagacagctgtaacattgtttacaaacgtataaataccatcccagcgagaaactagctttgtgcttctgtcataaaagagacacaggtttctaacaggaaatggaaaagggagaactactgagtcaagtgcaaactcccagccaggcagagagcagctgactctgtagaaccgtcccttcccgtctccctccacaccttgcctcctccaggcccaaccccattccaccagcaccccgccccaggcgcactggctaggactggaaggcaaggactaaggtgaaagctgactgcccgcaccgccccaggcgcactgggtaggactgaaaggcagggactaaggt

SEQ ID NO: 13313 - DNA, 1054 bp, Homo sapiens
cctggcctttaaatgttgaaaaaagtgagaaggagcattcatagttaagagcatgggatctggagtcgaactcatgtcacttattaacctcgtgtgcctgaataagttacttaacttccttctgccttcgtttttctcatctataacactccttaagagctgttatgaggatcgaacgagtaaatgcttgtaaaatgcttggaacgggtctggcatatagtaagcactataaatgttaataaaaacagtaataaaagccaaggacttttgggagggacagaaacttgggaaaggtcgaagttcttctctcacatttcttgggagtagaaaataagattaattggtagctcttggagagactggactggttctaaattttggagcagctagatggagtattatcagagtacaggcttcctggagagcaaaatacaaaagatgccaaggtgagataagttgaaggtaaaatataggtaaggaattaaagaacattgtgttcaatttttcctagtacctttctgtctctttttttcccagtcatactttcttagcaaatcattgtaccctaaattctttagtaccaaaagtagagctattctttctttctccaacagggagaacagtccttatctcttccattaagtcatgtattgcccgatactgtttgaagatacttcccacccacctcctccctctttgttggaatgaactgtttttgtgctttgactggaggggtcttgaatggataagcacaggtttaacttgtttaagcagatgttttgtctctctgattaaaaaaagctcaagaacagtttgcttgaaaggttttacaaaattttttaaaaggaaaacataaaacctgaactgaaagctagaaggggagaaggacggaggtaaacaaatcagcaggaatttaaagtggttatgtttcttctaatacagaataatcatgaccaagggacaagttgtcatgacattatgtgggaagtaagcattatgcactaataaatttgaaacagttaatcaacaagtcttgaattctgaggatttggtg

SEQ ID NO: 13314 - DNA, 1053 bp, Homo sapiens
tgggaatcagagtacctttctgcagaaggcgcacctgttgcctgctgctcggctgcattgtctgcgaaaggaaaaggggcgacgcttcactctgacttttggggtttctaaagagctgggtcacggtcactgtctaccctctccccttcctctcccccccccccgcaagcaccacgtcctccatcgaacgtgggcactgcatggaaataaggaaacatagaaaaataagccctacccccactcccattccctttcagatgggagtgtggggggtgggggtggggtagagagagtgagagagagagataattagaatgaatatatgccagaagaggaggaggcctgggacaggaaaagggagtaaaaggggatgaaccgggtagggaaatcccacccgaactgcgtgagccctctgagcgtctcgtgtcatgggacatctgtacgctcttccgctaagggggtgacgaaggtgggtgggagaggttagggcgctgcaaggcacatcccattccgtgcggctccaggtgcgtactacctggccacgccggccttgccttccgccggtgcttttgttgcaccctccccacatgtgagcggccgagccgctgcgcgggcgcaggggcttcggggaaagtgaagtgtcgcgacgctgcgggctgcgcagacctgggagaggtcacacctctttcggaaaaaaaaaaagaaaagaaaaaaaacaccaaaaaccacccaagctggctaccaaggtgaacgcagagcggttcccaccttaaaatcggccctgctcgtgacgtcaggtcggaaatataccaaagcgagcgcgggccaggagtccagggagcgcggcagcgcggcgattgggcggcgggccgctgacgcgcgctgacgcgcggagactttaggtgcatgttggcagcggcagcgcaagccacataaacaaaggcacattggcggccagggccagtccgcccggcggctcgcgcacggctccgcggtcccttttgcctgtccagccggccgcctgtccctgctccctccctccgtgaggtgtcc

SEQ ID NO: 13315 - DNA, 1053 bp, Homo sapiens
agctctttgaccaccacaggtagctccacccagatcccattgaccgcagcccaggagcccatgccgaagagagccaccagcaggtgggtcagcaccggacgggcgggcgtgggtgctgccattcagcccaaggctgggcccttccaggtcagggcaaaggtcacagccagttcttttcccacctagggccagacacgctttggctctcctgggaagtgaagacttcttctagcttgaaagaaacagagaaacagataggatgcagagccggagtcagaacagggtgagaccaggggaactgggggagccccgggcaggagcgcagatggggaggattggctaaaacgtacccagcgggaccgccggcaggcagggaagcaggaagccggcccgagtcgctgcggccccaggggaggaggccgaaggagcgagtggagccctcctctccagggagaggcggggctggagtcaacgccaccaccaccccaagccggacgccgggaaagggcgcctaccaggaggagccacgcacaccccagggcttcacggtgcccgcgaccgcaagagccaagtcagatcccaggggagtggccgggacggctctgctcggaggggcgccgccctctcggtaccgtcaggtgggcgactcgggagccgtccggtccctgcgcctcccggtcccgcgcccagtgcgctcccgctccagtgccggcttcccgccacgccgggacaccgccgtccggcccagggacgccacctcagtccggagcgcgcaggacccggcagcagccacgacccgactcacccgtggcggttccgggcccgcccccggcatggcccacgaccggaagtcccgccccggaagctggtcggcgggcgggcgggcgttgagaggaaccggggggttgtcggtctataagcctcgcccgttccgctccctggggcttccccgagcgccgtcggtggtcatggctgccccagcctcccggcaggtccgacgcagagcccgggcagcgccgcggccccgctcggccgaggactggtggtgggacc

SEQ ID NO: 13316 - DNA, 1052 bp, Homo sapiens
tttggctgttgaaaccttttctccatgaggaaaaacttcttagatgacaaagacctagtatttaatttataacataaacattatgaaaaaacgttgaaaatagtattgtttttactattagtaattaaaaaccaaaagtaacacaattaaataaggaatgtttaaacagccctagaatggtctatatggaaaatgaggctaactcataacggctaagggggtggagaggccgggcacggcagctcacgcctgtcatcccagcactttgggaggccaaggcaggtggatcacctgaggtcaggcgttcgagaccagcctggccaacatggtgaaaccccatctctactaaaaatacaaaaattaaccaggcgtggtgcctggcgcctgtaatcccagctacgcaggaggctgaggcaggagagttgcttgaacctgggaggcagaggttgcagtgagcccagattgcaccactgcactccagcctgggcaacaaaagtgaactctgttacaaaaacaaaacaaaacaaaacaaaaaaccacaaaacagaggggcaagtgagaggctcaggagactttgaccggaaggagctgggcttccccaaagagaacgcagggtccacagaccaagggtcagaggtcagaaggctgaggcctggaggcgcacagtgacccatggctgacttcaaacaccaaagctcaaagccaaggtccggctgccaaacctgaaggtaaagtagcgtcagaagtctacgacagctaatttttaacgaatagtaagcttaaaaaaacacaaaacgaggtagagagcgaggcccgtgctgtgcagaggagctgtggctctgcccgcacgctcagcacacagaggctgctcccccagaccccaaaaatcctggtgaaagaagagagggtgcgcccacaatggagagggtggcaccgaacgcccctgcgccagcaccaggccggcagcgcaggcggaagcgcagacagacccgagtgtgcaagggcaggaggggctgacggcttcgggcggagcataggggacgatgggtgtc

SEQ ID NO: 13317 - DNA, 1051 bp, Homo sapiens
agcaggatggaaatactttgctgcccttgccatcttttaggatgggcccccaggagactgaggtcttcctgggccctcattgctgcttatcgtaccccccatcacctgcacatgggacagaccgggctggagggtgaccttggctgtgtgcgtcccagcaaaagagctctggcccgcatctcgctgtgccctgaagggggatgaagggcgatgcctcgcccgaggctttgggctgctgcactgcatgctgggactgctcctactctctgtcccacccctcacccagctgtggtccggctttgggagagtggtgaattgcgctgcccgaactcggagcggagcagggtagggaccgtgtacagcttgataacccttaataaaaagggagtttgaccagacttcttgttgtctcgcgcggctagaatcctgggaacaagagaaatgggatggggactctgccggggtctagaagaaagtatgtttaggccgtcgctcagatacgctgagcaaggcggctggcggaagggcagcttccgacccacagttccgtggaggtctgtgtcctgccccgagccaggattccgtgaggtctgtttccagccccgagccacgattccgtggaggtttccagctcggcctggtcgtcagatttcccgccctgggcacgtgaccaagccggctctgcttctctaatttgcattcgttgcctgcaccattccccccgctcccccctcggagacatttggccaatgggagccgtgggtaggggctgtgggcggggctacagccgtggagcgcggtgcgagtccaacaccgagcattcccgtgggcctgcagttggcaggagggtcccgggcccagagccagcggggccgtgctgagacggcgtacgtgccctgcgtgagtgcgtggcggcggcgcgtgcgctaggggagtgggcggtgaggcctggtccacgtgcgtcccttcccgggacccccgcagcttggcgcccagcggctacgtgagccaaggcacccggatgtccgcgcccctctccgagtgaccagtc

SEQ ID NO: 13318 - DNA, 1051 bp, Homo sapiens
gtgctcccatgtaaggatgactctgagacccagctgagtgttccaggagagcccccgggtgggcagtggcctgggcctggccaagcagggtgcaccaggctcctgcccccatccctccaccgctggccctcaggtgggtcctgggtcccctctgggggcagtactggggctgcctcaagatccatcctgggctcctcttggggtggtcccttgtctccctcagagccttcctgggtcccccaggctccttcctgccccacatgccaggatgctggtttgaaggggagagtaggccagctacggcccctggcccgcatcactgctaaggacatggggtccccccatccctggctgtggtccccagcccgcatcactgctaaggacaagggtctctcggtccctggctgtgggccctggcctgcatcactgctgagaacacaggcaaccctggcctccatcactgctgaggacacagggtccccccgtccctggctgtggcccccggcctgcatcactgctgaggacacaggtgttccctgtccctggccatggcccccgaccttcatcactgctgaggacacaggtgtctgttccccatccctggccgttgccccctggctggcatcactgctgaggacacagggtcccccatccctggctgtgacccctggcctccatcattgctaaggacacaggcatttgtccccctctcccttgctgtggccccaagcatctgccctttgcctcccacagggccgagggtgaaactgaatccgggacagtgacacccgggctattttggggctgggctgggccggcctggccggcacagggggtggggtgggggcgggcccaggcttctccagctgacagtgtccgcctgtccttttgtccccgtccagtttgaggagcggccggagtgtgggctgctggtaggcagcctgctggtcctgggccctcggagggaggtgagacccggcagcccctgcctcccagcctgtgcccccagcctgcgtgctgcccagagcccccatagagagaggtgaggaga

SEQ ID NO: 13319 - DNA, 1051 bp, Homo sapiens
ccctaatgcgaacattctgtttctgagtctctgccctcccaagtctgtatcctcccctctctgactctttgccccacagtcgctatgcttcctgagtccctcccaagtctctatcctccctgagtctctgcccccgaccagtcgctatcctgcttcccctagtctctgcctcatctctgtcctcctctctctgggtttccatcctctttgagtctccatcttccaccctctgagtctccatcctcccctctctgggtctctattccctctccagtctccaacctctcctgactctccatcctcccctttctatgagtctccatcctcctgactctccatcctcccgagtgtccatcctcccctctctgactctccatactcctgagtctccatctttccgagtctccatcttcctctctctctgagtctccatcctccccctctctgagtctccatcttcccctctctgactctccatcctcccctctctgagtctttgccctgctgtcttcccctgtctgtgtctctctgtccctaagtctctgttgttctcatggtctttgagcctttctcctctgactgtttctctctgtctgtccctcagcctgaccctctgggcctctcctgccctccctctgcaccttccccaggacactgatgaagtgtggatggtctcctcactgatttcggtgtcagagaggccctggaaggcggccgtgaaggcctcctcacactcttcaagcttggggctccgcatcccaacaaacatctggcagatgcggaggcgctcagagtaggttgtgaagcagaggagacaggcccaggcgggcaccctgaagacagccagggccagcagggcagacgggacggcactggccagagccagcagggccatcgtgtgggtctcaaggccaggggagaagctagtaacctttatgaagtcaccacagggcgggggaagggccagtggtctggggtcagaggtcaggtttcagttggtggtcaaatgtcatgctctggaggaagggtatgaggagtcaggggtcagaag

SEQ ID NO: 13320 - DNA, 1051 bp, Homo sapiens
ctaggactgacaatccaggcagtcttttccaccactggcccagccctgctgctgcttctggtcagcttcctcacctttgacctgctccataggtaagtgggcagcagcctggcaggtgggcattgtaggcgggcgggccagtggacaacttccctaagcccagtcaccaccctctctctccacaggcccgcaggtcacactctgccacagcgcaaacttctcaccaggggccagagtcagggggccggtgaaggtcctggacagcaggaggctctactcctgcaaatgggtacagtctcaggacaacttagcctccaggacgcactgctgctgctgctcatggggctgggcccgctcctgagagcctgtggcatgcccttgaccctgcttggcctggctttctgcctccatccttgggcctgagagcccctccccacaactcagtgtccttcaaatatacaatgaccacccttcttcatcaggcccccttttctccttcctggctgggcaggtgggatgatacccctttcttcccagcctgaacctcacagtcctataatataggtatcagatacctggatctgagtctttgggcagcaagagaaggtaggatactagccagggagcccaaggaagaatgtggcagccacctcagagcctgtggattgggggcagccactctggcctcctctgtggctctagagaatgaaggtccagacagaaagacttgcgagagagcagtttggaaaggggtggatatcagccagcagggaaagcaggaaagggacagggatccagggagggcttcccatgagaaagcatgagaaactacatctgcggggctccgaggctcccctgccagcctggagggtccgtgcagagggacttgggtgggcctcacaccctacagtgactcctctcttggctggaccccaccccagcccgggtcacaaaggggctcctctggggagggtgggggtagatgagagtggggacttggatctgcctgccaggccgtcctgggcgctgcaggaagcaacatgacttaggt

SEQ ID NO: 13321 - DNA, 1050 bp, Homo sapiens
tctttcctaattttcccgtcctctggggaaaggtcggggatacctgaaccaaagtgtgtgtgtgtgggggggggggggtgtaggtggggcgtgcatagatgtgcacaaccaagggcttggccctccggagaacgcccaggggcagtggcctccgaggttctggcggccggcagtggcgaccggcgcagggaatcgcgcagggttgcggctgaggtcagaccagcgagagacagagacccgcagacatttagtccagagactgtagcaaaggagggggacgaggggccagagccggaatttcgggggaggacttgggagcgcggcgaccagagtcgcttgctggcacttgcgagggcgaatgcaggggcttggccgagatgaccttggaccagagctcccttccggcctgcagagatgagcttggggcttagccgagtaaggagtgagcggcttttcagcctcagtgctgcggcagaggcggatggaggatgaactggagccgtccttacggcctcggacgcaggtgagctcccagcggcggcgacaaaccccgcggcggtgaccccaaaccccccccccgcggcggcgactcccccccaacacgctggggcgaactccccagcacccccagcccttcttaaaaacgctgagtccgcgcatgcgcctcaggcgccctccgcgacactctagcggctctgcgcttcactgcgcctgagcttgagtctcaggccttagtcccggccatcgtttagcgttgcgcgaaccctcagctggtgcggccgctctcaatacccactgcgcttgcgctacagcttcgtctcgacgggtttgctcctctcaaacgctcactgcgcgtgcgctagcgcctctttcaccactgggcgctgcgcgctgcccttccctccgcgcacaggctgccggctcaccgcttgctaatggcagccggggtctccctgggacagcaagacctccgctcaggcccctctttcgaatgctccacgccctcctgcgatctagaatggtatgaattctcatacttgcccagaccag

SEQ ID NO: 13322 - DNA, 1049 bp, Homo sapiens
tctgatggaatccagatggaactcgtcactgtcactgcggtggagacggtggggccacatctgcactgaatcctactctgcgccttcaatggctgcgtaatggcggatggccatttccttgactaggatgagacattgcctactctgcgtggctgctgtgagcgtgaaatgggatcatgtgcggaacagccacgcatggtccgtgaaatgggatcatgtgcagaacagccacgcatggtccttggtgtgtgacagatattgggtccctctgtggtcccaggcagacattgcccggggtgggggccgaatgcatggtcaagttgaggggcctgggactgtttcacgggtctagaaaaagaaagcagaaacgctggaagcaggactttattgtccgacatggggctgcctctgagcctgggctgtgttggctggacgtgagccataatgcaggtgtccccctcccaagccctgctcagtccactcacagcccgatggccaagggaggacatggctgcccgccacggcagtatcttcagaggtgaggcggttgtccctacgctctatgcttcttatacaaattagatataggtgaagccacccattaagcaacccagcctttctgggactatttgggctgcctccgggtccactaaatgcggttcattttccccaagccccctccgagttcaaggaggctccttcctttcctcctcccacttgcttctcccaggctccctgactcctgcgctctgggatctgcaccccaccatggggtgaggaagctgaactgcatggtgaggcagctgccctgcatgcagccacatcatgggctggagatgccactgtccgcttggtttaatgatcaatgagctccctgccaggaaaccctttctgacctggtttgcccctcagtccctcgggctcatacctagtgcctgcggcaggacagccatggccgccaactccaccagcgacctccacactcccgggacgcagctgagcgtggctgacatcatcgtcatcactgtgtattttgctctgaatgtggc

SEQ ID NO: 13323 - DNA, 1048 bp, Homo sapiens
gtcccgggattcagagagatactgcctttgcactgcctggaggagaccactgtgggacctctttactcttaccaataatataaacaccctgcacccctccacacacaccccaggttgcactgtagggacaagaacgagtgagtcctgaggcatttggaacccttgaatgggacgcacaaagcccaaaacgcaacaatgtagattgacaagagtcgtcgggcaaactcgggggagggagggaaggatgtgcagggaaggatgaattcggtccttgagaccggaaaggtgctcgtgggtatccgcttctggaggcttaggacgtctttatgaagcctagggcagtagtggaactgccatctttggaaggatacctgacgtggtagatcagagagccgggagaggtggggagctgtcggagaatctcggctgcgctatccctcctgggcttttgcgatgccaacgcaggcgtcgacgactgcagtttccctgaaatagtcggagcaaaggagagaaaagcccagttctttcaccttggagtggcgagagaaaggcacctagaagctcgagggcggggacggcagagggagccagcggccgggggtgggccaggagcactgcggggcgcaagcccgggtcagttctgcgcgttgggttcgcccactttctgagcgcctgcgaagagcggggaagctctggcgcgaacccgcaggccccgcccgaggacgctcgcggggcgagcccccagcccagctcgagccgccccggcgcctgccactccctactcagagcccctccgtgagcgcgccgctgcccaccgcctccaatcaccactctgcgtggagcgctttaaatatgcaaagacacgtcacgttgtgtgaaccgggatcggtccgtagggggggagccaatatctatataaacgtgtccagcgtgggccaagaagggttaaacgactggaggagggacaggtggggcgggggtctgcagaccaggttggcaacactggtgagttgctcttctttcgccctccttcccttcttctatccaa

SEQ ID NO: 13324 - DNA, 1048 bp, Homo sapiens
ctctggggctgttttccttagataaataagtggttctatttaatgtgaagcctgttttatgaacaggatgaatgtggtatatattcagaataactaatgtttggaagttgttttgttttgctaaaacaaagttttagcaaacgattttttttttcaaatttgtgtcttctgttctcaaagcatctctgatgtaagagataatgcgccacgatgggcatcagaagacctcagctcaaatcccagttctgccagctatgagctgtgtggcaccaacaggtgtcctgttctcccagggtctcccttttcccatttgaaatataaaaaataacaattcctgccttcacgtgtttttttagggggttaaatggtaaaggtgtttatatctgctaaggtaatttacttgatatatgtttggttattgaagatatatgagttatgttagctatttcatgtttaggctgctgtatttttagtaggctatattaaatagaggatttcattataaaggacaaagtctcctaatcttcgatataggattgacatactttttaaatatacaaggcatagaatatggccatttccgttaaatcataaattcccaactggttattaatctaagaattcagaattttaagtaattgtttttgcatcagattgtttacttcagtgctctcaattatgacggtgcattggaaccacttgggttaacatttttttgtttttattaccaatacctaggcttcaacctagtacaatgaaaccagaatgtacagagtgggcactgggacgaaggagaacaagaccaaaggacattttatttttatctctatcagtgggtcaaagtcctttcagaaggagcatatagtgggcctaggtgattggccactttatccatcaaagaggcacacacacttaattagcatggagtgttataaaaagcttggagtgcaagctcacggttgtcttaacaagaggagaaggcttcaatggatccttttgtggtccttgtgctctgtctctcatgtttgcttctcctttcaatctggag

SEQ ID NO: 13325 - DNA, 1048 bp, Homo sapiens
ttcctagcagtcaggtctccaacagggccctggactgcctggaggcaagacttgaactccatccagcagcagggggatagaggcttgtctcttccaggttgcctgattcagcatccagaagtggtacacggtgtcctaccggcccagggttagagaggagcacaggagatgatctggaacaaggcttggcctggcctggctcgcttgacacctgaactctcaagttcatgcttttatctgccacacactcagtaggtgctctttaagagcaggtgtcacacagtggaaactctatctgacccctctcggcttactctccaccttatgtgggaggtgctgagacctgaggatccagtgcctgtgctgtgtcaccctgagctggttcctctgcatccagctggtctcccacacccaggttttggccagctgcccagacatgggagcggcacccaggctgtggggattggctggcccagcccagcccagcctagcctcccacagccttccctacatcaggggccaggggaaaaaacctcccagaagaaggggagaggaggttgtgtgggacaaggtgctcctgacagaaggtgccagggtgggggtggtgggcctggggcatcctagcctgtgatggagatgggcactgggcaagggattgggcgcacacataggggagccccagccttcccacattctccattgctgcccaaggcccaggcagctcctggttgctggcttggaggatgagtggttttctaactgaaaccaagcccctggcaacgtcctaatgattcaggctgggcctttctggactttaatcagtttctctgtctttctcaatctaagtgcttaccgggtaactggaggccacttggttgctggttttggctgggcctttctggactttacccctcagcccctgtttatccatccctgtttactcttactgttctatctccagcactgcccgtctctgcctctctccactgtccctggagctccctgggcccttccctgggcctcaggacctcactcaccaccccatctg

SEQ ID NO: 13326 - DNA, 1048 bp, Homo sapiens
gaggtcaaggtcaaaggtgagagggcagggaggttccagagggagggagggagggagggaagggaggactcttgccttcggggatcccacagtgtgagagggaagcaaaggtagctggaaggcgcagcctgggttggaaaaagagtgaggagacacgggcctttgttgtctcctttctctcttcaggtggaggacattctacccacaatctaacttaagtccctcatgctgtagagtgagcacaattgaactttatttacccttgtgtacagaggagtgacaaggagggtgaggggaggccagcgtgctgggtgctcacctggctcaggggtcctctctgccccacaggggtcgtctttctctaccgagagggctctgcccgctatgctttctccttttctggggcccaggaggcctgtgcccgcattggagcccacatcgccaccccggagcagctctatgccgcctaccttgggggctatgagcaatgtgatgctggctggctgtcggatcagaccgtgaggtgggcaggggctgtggattggggcttctattggcccctgaggtggccatggccccccttctgctgggtgctgcctgctgtgtcaggctggacatgcagggctttttgcctctgggggatgaggctggtctgaggaggggaggtgaggaccctgagcatgtgcatccctgcagtgctagaaggacagccagctgtcagcaagtgtctgcactgtggtggcagtggggttcaatagaatcaatatgggctggctccctggtgaaagcatctgtactaagtgattctgtccttcctccctaggtatcccatccagaccccacgagaggcctgttacggagacatggatggcttccccggggtccggaactatggtgtggtggacccggatgacctctatgatgtgtactgttatgctgaagacctaaatggtgattaggagtgagaggttcccaggggacaatttcctactcccatgctgcccataggtcctcccggggcctctgcaggaccttactatccctcctg

SEQ ID NO: 13327 - DNA, 1048 bp, Homo sapiens
taagtggttttccagttgctcgttttgcttatagtagtaaatttaaacatttctgctataaacaccttctttgtttaaagaaacattatttaaatgaacatttctatagtaaaaaagtagtgatagcttttctcaaatatatatctcaccctgaagctggtgtgaattgtttcaatttcaagacgctttaaattctgttataaattatattaacataaaatgaatttatggggttgttttgttttgtttggagacagagtcttgctctgttgcccaggctggagtgcagtggtgcagtcgtagttcactgcagcctcaaacctaggctcaagcaatcctcctgcctcagcctcctgagtagctgggacgacaggcagacaccaccatgtctgattagtttattttgtttttgtagagatggggtcttgctatgttgcccaggctggtcttgaactcctgggctcaagcaatccccccacctcagcctcccagagtgttagcattacaggtgtgagccaccatgcccagctgcaaatttttgattatatgaattattaagccaactttctcttacacctgaaatacttttcagtcttttactgacatgtaatactaacctttttttggtttatattaaaaatgagtacctcagtagtgatatcttagttggaaatgaagtataagtttatatcagacttacagaaaatctctttctttgaacttttaataacctgcatcccaattgggttacatttaattgtgtttattctagaacatgacctttgacctgccatcagatgccacagtggtgctcaaccgcagctcctgtggaaaagagaacacttctgaccccagtctcgtgattgcttttggaagaggacatacactcactctcaatttcacgagaaatgcaacacgttacagcgtccagctcatgagttttgtttataacttgtcagacacacaccttttccccaatgcgagctccaaaggtaagaaccaaaatgggccgattatgaagtgatagaaaattgggttggaggattgt

SEQ ID NO: 13328 - DNA, 1048 bp, Homo sapiens
ctacaggacagttccattcccacacctgagctttggacaactgaatcctatgccccttcccacccagggaacctggtgccagaaattcccaggacttacccaccatccaccacgccacatagcaagtgtcctcagtgtctgcagaccagaaacaactcccttgtgtctcagcaccgggccacctgctgaaaccccaaactgcctgccccattgtttgagacccagtcaggccttggctccaaaagtcctcttggactgccactggcccccagggtctctcctgactgcacctcggtcccggagctcccacgccgctgggccccgagccccatgccccgatccagctgtggctcctttacgggggccttgctggcctttcctaagggaggtgttttcccgagggcaggtggactgctcctcagactaggggccctcggagggccaggcctgggcttctacctcctctcgcaggctggtgtttctctgcaaatatggctcgtgtgtcctccttcctctcagactgggggcccctgaggactgggcctgagtttccctctcccccttcagaatgggggttccctgaggactgacccagggcctccccccgtcccctccatctggctgttaatctccaacactttcacctccagtcctattctgcacagcgctccccagcgctgggagctcagaggcctcttcagccttccccagggctggggctcagggagggcttcctcaggcgctggccccagagtcaggctgcacattggcttggaggacaggcctttcctctgggactgtgaggcccagagtgcccacccagaactccacctctgacctcacaaaggcctgcttcagaactcggtctccactgcactgctggccagacgagggatgttattttgggcagtgcatctggacttggttcaagtggcaccagccaaatccctgccttactgacctctcccctggaggagcaggagcagcgctcaaggccgccctgggagggctgagaggcaggctctggactggggacacagggatagct

SEQ ID NO: 13329 - DNA, 1047 bp, Homo sapiens
gcccattttacagatcaggaatgtagagtttcagccttaggaggaggacgaggacgaggacactcacgtggggctcctcctggggcttcacctgtccttccccccccaaccctgatcaggctgaagcagagggaattcacacatgttgggtgcccactaagtgtgccaggaaatacgctttgcctaccctttccattcaatcctcagagaaccctgggaggaagattctcttctatgattgtctctattttacggatgtgaaagtagaggcccagagacgtgccgaggtgatgtggcaaggtcagggagccacagagcctaagagggcagcagtttaagaggacataagaggcccccgctggacgatgctgcggcccccacccccgcctcacgggtacacacccgcggagcacaccccgtgtgctccccgtgtggcgcctgccagtggtctctggaacctgatggggaagaggtcagcttcctgattgagcacagaagcccttcccattttacagatgaggaaactgacctccggagaggaacgtgaccttctcaaagattccttttttactaggaaagattgttaaatccctctccctacgtcccctactcaatgactcatcggccccacggacttgttcgggagtgggagcgcctgtgtatcccagttcccccttggaaatagactcgactcctggactgttagcctcggtatttagagagacatccccctggcttggcccaggggccgctcgcaggggctgtcgccgtgccaagggcccccccacctctgccccaaagtccctcccagggaggcgctgtcgcaacccgcgggacgggggcagggagaccggacccagaggcactggggtagggctcggcagggcgggtccgggcggagcgcggggtgcggagggcggaggcggctccggcgcccgctctgcccgccgctgggtccgaccgcgctcgccttccttgcagccgcgcctcggccccatggacgccctgtgcggttccggggagctcggctccaagttctgggtaagg

SEQ ID NO: 13330 - DNA, 1047 bp, Homo sapiens
agcctccctggattaccctagtacagaggttgccaaattgcttctgcaaagagccacatagtaaatattttaggctttgagggctatgtggtctttgctgccattattcaactctgtcactgtagcatgaaaggtgctgtagataatatgtacaaaaatgggaatggctatgtttcaataaaactttgtttacaaaagcagtggaccagatttggcccttgatgatgttattcttcttacaacttctaaaactcagaagctggtgccccaaagctctcatgccaaaagtggcaagcccgctggttttgctgggctatgggcctgggtctgctgctccacttccacactgctaaaagaagttcatgtccacctgcccagggctctgtggcttagaagctttaagccatgtctggtcattcctccacccttccaatcacactcaaatcccactttcccatcatccaaaatcagagaaattagaagtatccaggtaattgagctacgtccagaaatacctgacgtcacaccttggagaggtttctggaacatagtctatgctgttgtatcagttagcttcttctgcttaacaaataactcaaatgcttaatgtcttaaaacaatagacatttattattcattataattctggataggtcttcttgtcttggctgacttggcttgggccaggtggtctaggacggtctcactcacatgtctggggccttggcaggatgaccagatcctctccccctgttgttgctcaccattagcctagcctaggcttcttcacgtggtggatgggttcccatcagtaagagaagacaatcaccatacaatcatagcaagccaacgccacttatccagtgaaccagctcaaacaaacacttctcaccctctgcttgtatcacatttgctaatatccccttggccaaacaaattgcgtgactaagcttggattctatggatgaagaaataaacttcacctcctaaggggagaagtgacaaagtcaccttgcaaaagggagagcctaccagaacttgcatttg

SEQ ID NO: 13331 - DNA, 1046 bp, Homo sapiens
gttgcgtttttcttttgttcgaggcagcacacccgtcccaggcacaggccttcattcctctgtggacgtggtcttgtgccgcagaacaaattgtgcgcttaattgaaaagtatataaataaaatctgataaagtgcccagttataggcccctaagtgggttctgtagaaaacggattagaaattgtaattacactgctctccggggccctgccccgccctttctgcggcctggaggtcagggcggggctccctgtcaggtggaggagtttgccaggcactccctggagtccctgaggaggaagcccaggctcttccaggagcctgctccacccctgtggctgtggaggagttcagcaggcccggagcccttcacacccacttctgattagatcagactctgcctctgagatgctgggaggcccctcaggcggcggcaataccaagtaatgcctttagcctcctttgatcagctgtgacgggcgtcctggtctgagactgtgaagcaattggaaatagttctcccactccaggctcagcttggggatctgtggggaaatggcttcctactgcccagctctgcagtttccttgcccagggttggttctttgtctcatgaaatacagttagtacaacactccctccccccggccctgcctggtagcacgtgatagggatcagctctctgcaatttgacttgaatagctcaggacctgaactggtacgttgtgttcttacgagtcaagggagctctcatgattggggtgaaacaagaatatcaacaagagatgggttctgtccaacccagaaatcacagcgagtcgagtattctcccagcttgtctgggcaggagacagggttgggcctgtgcgtgccaagactgccgtgtttttgctgggggtcttgtctgtccctcgtggaggaaataactgctcccttttcttctctctcaggtgtgacgtatgcagccaaaggctactttgacgccctggtgaagatgggggagctggccagcgagagccagggctccaaagaactcggtgagacc

SEQ ID NO: 13332 - DNA, 1045 bp, Homo sapiens
gaggactcttccacctcttcctctgctcctggggctcccacctggaggcctgatcctaactcccctgtgggtacagatggtggtggcggcaacagcagcagaagaccctggaaggcagcagctgaagcgaccagaagggcagtcagtgcccagaagaaggtgctggcgggaaaacgctcaaggaagtcgagcggggggccaggggtgccgttgatgggggctggcgggcactcgaggcggcccacaccctgcactagggccagcacgcagggcagcagggcactcaggccttgacccaggaagaatgaccgtaagaagcgaggtggcaggtggctcaagaagggcaggaaagtgacattcgaggcacagcatgccagtgccagcacaaaggccagtgctaagaaggccacagaatgcaactgtcctgccactggggccacatggtgccacagagaggccagcagggctgtgcccaccatgcccagcacctgcaccacccggatggggacctgctcgtcctttcctggggccagcctcctccagagggtcaccaccagcagacccaggttccccagagccacaagcacagagacgtaagaggggaggctccaacctgcagggaagggaggaggccatgtcagggtcatgatgcccaagggaggaagagtgccaaagcccaccttcctgggcacacctgcacctcctcccactcaccctctggaagctctctgaccaccacaggtagctccacccagatcccactgaccgcagcccaggagtcttgggcacacctgcacctccctcccactcaccctctggaagctctttgaccaccacaggtagctccacccagatcccattgaccgcagcccaggagcccatgccgaagagagccaccagcaggtgggtcagcaccggacgggcgggcgtgggtgctgccattcagcccaaggctgggcccttccaggtcagggcaaaggtcacagccagttcttttcccacctagggccagacacgctttggctctcctgggaagtgaagactt

SEQ ID NO: 13333 - DNA, 1042 bp, Homo sapiens
ccacatagcaagtgtcctcagtgtctgcagaccagaaacaactcccttgtgtctcagcactgggccacctgctgaaaccccaaactgcctgccccattgtttgagacccagtcaggccttggctccaaaagtcctcttggactgccactggcccccagggtctctcctgactgcacctcggtcccggagctcccacaccgctgggccccgagccccatgccccgatccagctgtggctcctttacgggggccttgctggcctttcctaagggaggtgttttcccgagggcaggtggactgctcctcagactaggggccctcggagggccaggcctgggcttctacctcctctcgcaggctggtgtttctctgcaaatatggctcgtgtgtcctccttcctctcagactgggggcccctgaggactgggcctgagtttccctctcccccttcagaatgggggttccctgaggactgacccagggcctccccccgtcccctccatctggctgttaatctccaacacttccacctccagtcctattctgcacagcgctccccagcgctgggagctcagaggcctcttcagccttccccagggctggggctcagggagggcttcctcaggcgctggccccagagtcaggctgcacattggcttggaggacaggcctttcctctgggactgtgaggcccagagtgcccacccagaactccacctctgacctcacaaaggcctgcttcagaactcagtctccactgcactgctggccagacgagggaagttattttgggcagtgcatctggacttggttcaagtggcaccagccaaatccctgccttactgacctctcccctggaggagcaggagcagcgctcaaggccgccttgggagggctgagaggcaggctctggactggggacacagggatagctgagccccagctgggggtggaagctgagccagagacagtcacagaggaacaagatcaagatgcgctttaactgagaagcccccaaggcagaggctgagaatcagaagac

SEQ ID NO: 13334 - DNA, 1041 bp, Homo sapiens
ttaaagactgacaagggtaggcggttctgggaagctgtccttcaactgacctgacccgaaggcaaacggccctccgcgaggaatgcacctaccacaaagcacccagaggacacccaagtcccaaggcttcacccaccttactcctagccactccactcctagatatttatttaagagaaatgaagacacaggtcccacaaacgcccacgaattttcatggaagcatttttcctaatggtcctaaactggaaacaaccaatggatacacaatttgtgatactattcaacgattaaacaaaccacatggtcgagtccaaagcatagagtgaaaacccctgagaccacatgctcattcataaattctagaaagcaccctgtttatttgaaattccggaaaaggcaaacctaacctacagcaatagtcatcgatgagatgcgggcgttaacttcaaaggggcagcaaggggaatttttggggcgatggaaatgttgttttgagtagttactcctgtggatgcctttgtcgaagctcatctcaaactatggactggcaagatgtgtacacttcattgtatgtaaattatacactaaacaaaaaagttgtagggaaaaaaaaaaaaaagcaaaacaagccctgagacttactgaagcgtttctttccaggaaagcctggaggaaggcagcgcttttcaactccccagcgcattgccggccctggagaccgaaggaggtgcctggaaccagggtgaagtccagcgcgcagggtcctcccgcgccggcctcgggcgctcgcagggggcgggtcgggacctgggattgcgccgggctcttcctgttcctgccgcgccctcttccccggcccggccgggcgggaccagtgcgcagccggggctggcgggcggcggggtccgcggggccgcaggagatgacggccggcggccaggccgaggccgagggcgctggcggggagcccggcgcggcgcggctgccctcgcgggtggcccggctgctgtcggcgctcttctacgggacctgctcctt

SEQ ID NO: 13335 - DNA, 1040 bp, Homo sapiens
aaggcagtaggccaaatttgattgaattgaataattccttattttcatcagcttctcctttttttttttttttttttttttttgagatggagtattgctgtgtcacccaggctggagtgcagtggtgtaatcttggctcactgcagcctccacctcccaggttcaagtgattctcttgcctcagcctcccgagtagctgggattaaaagtacccaccatcacgcccggttaatttttgtgtttttagtacagatggggttttgccatgtgggccaggatggtctcgaactcttgacctcaattgatctgcccccctcagcttcccaacgtgctgggattacaggtgtgagccaccgcacccagccagcctctcagttttgaacatgcactaccaccacctccacaacacacaaatgtaaatgcactttcgtatataaaactgtataaatacaaggaagctcatacacatgcaaggatacacacataagcacccccagattcaaccacagaaatatacgccagtacatttgcataaattcaaacacccctttacatgtaaaaatcatataagcacatacagggatgcaagcaggcatggacaaatgcatgcaagcacagacaaacagacaaagctaagtaaaaaagtgcaagctcacctatgcttacaaaaatagacatacatatacccacaaacccacacacccacacattcacttgctcacctggactttgatatctctaccactgtatccctgccaatatctacagagtgggtaaagggataggcatcaggtcactgggttgcccaagcaggaagtctgggttccctaacaactttttctaagctaatgctcctggatgatgatgaaaaaggaggtggggaatggatgaaattttataacagggtgcagaggcagggtcaggataaaaggcccagttggaggctgcagcagggtgcagggcagtcagaccaggaccatggaactcagcgtcctcctcttccttgcactcctcacaggactcttgctactcctggttca

SEQ ID NO: 13336 - DNA, 1040 bp, Homo sapiens
ctgtccagtgaattctgtgcttgataatagtccatctatgctgtattaaaattaaattgtaacatgatcggttcacctcataatgatctttatttcataaaacaatttgagatgaggtaaaatttgacttcaaaactaacataacaccataaatttccaaaatagttttataaaaaaattaaaaagcccacaacactatagatagataacataccttaatttttattttattttatttatttatttttttatgagacggagttttgctcttgttgcccaggctggagtgcaatcgtgtgatcttggctcactgcaaactctgcctcatggattcaagcgattctcctgcctcagcctcccgagtagctgggattacgggcatgcgccaccacgcccggctaattttgtatttttagtagagacggcgtttcaccaatattggaggggctggtcttgaacccccaacctcaggtgacccgcccgcctcggcttcctaaagtgctgggattacaggactggccactgcgggagctgcggcagctgcggcctctgggtacggggtcagcgggcagtcctgtaatggccacattacaggacaggccatcgcgcctggccacatgccttaattttcaaagtcaaatttgtctttaaaaagaatgaattcctaccctttgggggtatttatttttgcaactaacttccatccttttattaagtaatcaaacatagcccatttgaatgttggaaaagaactgtcagaaatacaagttcttattttgtactttggtaacatgaattttacacttagttgaacatgaagaatcaaaaaagctctggattgttgtaataattgtttagaattttagatgtaccatttgacctttgactttaagatgaatttcagtgtcctcagtaaataaaggcttacccccaaccttaaatagtgacgcacaaaggctattattaccaccactgagtggcttaaataatcctgtcaacagcaatcgcccatttccaaagccatggtgaaacatctctgt

SEQ ID NO: 13337 - DNA, 1039 bp, Homo sapiens
agcaacagtgggataagattggaaaggtatattgggggcttattcaagaggaacttagaatatggaactgggtatttgtaattcaaaggacattgttaatgtagagatgttcacattagtttaccagagctatcactattctagggaatatacgctaaccaaatgcccccaatctctcttcacatataattttgtcatctataatggatatatatcatttaattatatggctgtaccaacatatatgtaatcattcacctgtcgttgaacctataggttgtttctaatattctgctttgcaataatattataacactcttcttttgctaatttttttgcattgcttctataggctagaatcttagatattaaactgataggataagatataaaataatttaagattgctgatatatgttttaaaattaattatttgctcaagcatttgtgacaatttacagttctaattgaggttttaaatttagtagtttgtaggtattttaagttttgcccctgaattctttataggtgctgataagcctttggtaagttttactccatgaaagactattactgaaaaaaacgtaatctcaataaaagaactttaataagcttgactaaatatttagaaagcacattgtgttcagtgaaactttgtatataatgaatagaataataaaagattatgttggatgactagtctgtaattgcctcaaggaaagcatacaatgaataagttattttggtacttcctcaaaatagccaacacaatagggaaatggagaaaatgtactctgaacaccatgaaaagggaacctgaaaatctaatgtgtaaacttggagaaatgacattagaaaacgaaagcaacaaaagagaacactctccaaaataatctgagatgcatgaaaggcaaacattcactagagctggaatttccctaagtctatgcagggataagtagcatatttgaccttcaccatgattatcaagcacttctttggaactgtgttggtgctgctggcctctaccactatcttc

SEQ ID NO: 13338 - DNA, 1039 bp, Homo sapiens
ggctgtcttatttctccttcggtaattatctcttcccacttcctattccttagtaacaccctctcaatcaaatagcaaccctactgctctggaagattatctccctatttatctggataaatacacgctattctaagaaattatatttatttactcatggctacttttcaacctaggtaaagaggccccacaacacaggtaacattttccacactacagctgcataactctgttctctaataattgatgtcttaccagaagaagaagggatggacccaagagagaagtggacacttctaagaatacccacaaatgacaaaggtagaataaaaggacacaaggaaggcctaaggagaatgaagggaatgagagtaatatgggggaattttctatgtaaagggaattctctttcccaaatactctctgttaagatttccaagtatctgtcttgtgggtacaccaggatagcagagggaagggactaatgccacggtgctactccaccttaactgaccctccacgctgaagcccctcatctctatttcaactctagcattcattctccttgctaccaggacaaaggtcaaatcatacctggagctgggaaacaaagccctctcaaatctgaatatgtgtttcacgaggagagagagagcagcagaggggaccacgaggaaggcagagattccctgacgacctcatgcctttgtacaccactcgcctttactctctggattaaacagcattagggagacaagagaggaaacacatgtggtgtctggagacctgtgcctgcctgttccagtcccacacccagtcatctcaccacacccttcacctcactttaccttctcctccagcacaggaactaggaactacggagagagaagccaagggagaggaggaggaggaaactaacgattccctgcccacccccacacccagcaccaccaacaggtgggcaagcttgccgagaaaacgcagagggcatcctgtgagcagcaaacacatctgagcctggaaaagacgcagagaagta

SEQ ID NO: 13339 - DNA, 1038 bp, Homo sapiens
tgacaaagttgttgaggctttgagaaaacttctgatgctacgggaaataattcttttgacttatggtgattgcttttttgaacttttcactcttactcagtaacttaagtttggaggagagaattttgagaagtgatttaaatgagaatgcaaatgataatcatggaaaccaggaacatagagtaccaattaacactattggctcggaagtacaaaaagcaaaaatgttttctcagtgaacatgttaacatcatgatgtgatcaaagtaagttgttaaacatcaaacaaagataatcagtaaacattactccttttccattttattattaataggcccaatttgtgataattatctgtaaatgctggaagaagagaggattagagtgtgctcatcaaagggactaaaggacactgtgttcttcttgaggtctcaagttcctttaaggtgaagctacggtgacacatttagtggggagaggccataggcagaggtttccttatatacgacctccttaaactcttagctgttgagtagcagaggtaggagtgtttatgtaatcgagttattcttattgggctgagaaaacctacacttgtttgaactgctttctgggaacagagaaggggagggaagcccctgtcggctggaaactaaaggaacagagcaaaggcattatttgagtgtcttgggatgttctgtattccatctaacagtgcactaaaaaaagataagttcctgagaacaattctgattttgtagttcagtttagttacttggcgatgaggaactggaataaatgtgaagaacaaactcttgagacaatatagcagagagtagagaattcagaaatgaagacaacatttatgcttgttttcttgctgggcttgcatgtggagtgactatgcctttttcaccttctgattggttggattccaattaaatggtggtgcctatcttaacccctgaatcaagactgaaagacttttgagatggacttttgaaagagtgtttgagggaactgttaatgctggctgta

SEQ ID NO: 13340 - DNA, 1038 bp, Homo sapiens
tataaagattgctgggacagggaggtggggggagacaccagcttgggaagtcaggcttgttagatcctagttcaccacctgatacgttacaaatactaaaaccatcactttcaaattatttttactacattttcctgttatctgtactcgagtttatttatgtttctggcatctagagtcagcccttcatgggcatgagacccaagcagccacacgaggctctgaacccagaagagcatatgctcggtttaatggtctgtcatcttagaattgttaataaagtttttatcccgcattttcattttgcactgagattcataaattatatagcaggccctgactgtacctgtatagtggaattactatatgatggtacgctactgtgcatatcttccccgttcagtgttcagtgccctcgtatcggcagcttgaactagctcatggtacacgctgggaatcagggtgggaatcagttgtaaaccatttaccggaacaccactaggcaggccacaggataaaggaataatgatggtacacctccccctacctctaccacctgggaattttggtagaatgccagaatggaaaagaaaatctcttgcatagccatttataatttgtgataaggaagaaaaacaatgacctcagctttagcattattttacaatataaattcagatcccgtgactgaaaactgttggacttaaaagaggacgctccaggagcgcaaaagcagttgggccgaacgaagcgtgcgcgctttggtaaccggctagaaatcccgcacgcgcgcctgcctcctctccccaggcctgagctgcccctcccactgcctttccttcttcccgcgagtcagaagcttcgcgagggcccagagaggcggtggggtgggcgaccctacgccagctccgggcgggagaaagcccaccctctcccgcgccccaggaaaccgccggcgttcggcgctgcgcagagccatggaattctcctggctggagacgcgctgggcgcggcccttttacctggcgttcgtgttct

SEQ ID NO: 13341 - DNA, 1038 bp, Homo sapiens
cattactcctgcgagtcagacaaatagttatgtaaaggtccagttcaagagagtcatccgggctcaagaaagactggagggagggtatctgtaaaggcttcaaagtctgccacatattaagcacttggtaagtattagctatcaaaggaaataccagatagtaagtctactgtttaattaacttatgatactatactactcctaccgtctactctcgccctccgctgtcagctgggctaactcctattcagccttcaagtctcagcttaaaggtcatttcctcagcaaaatttactttcaggaccccttcatacgacccccttattcacgcccatggcatattctactttgcctctcggtaacatctagcaaggtcgtctttatacagaaactcgtgttttgagtactgcttgtggccagcgtacgagcgtagcttcccagcgcccagtgcagtgcctggctcagtaaatcttcaccgaaccaccccactccactccccagcaaaaccaccccagaacgaaggccacgccaacgcgggtcgtgctccgcgatgacaagagcccgcgccccaccaccagctgcccttcctctccatctctcagggtgagccttctccccggcgggaacactctctcccaacccgggcaccctcagggctgagggatgcccctttcctaggccacctcctacaaggcccctcgcgatcgcctaccttggccactttgggaatccgctgcttcccggccgcggtggaggccgccatgtctgcagcagtcgacctctggacacctgtccccggcacggacgctagaaatcggctctgagagctcaccgaaaccacaaagctttcagaaaacaaacaggatctcggaaccggaagcggaacttgcaggactgacctttgacctctcgcttgagccgtgacggaggcggcaccgtttccatggtgaccaggctgcgcgtcctccttgcggcagcgcgtggagtgcggcgtcctggagctgcggatgaggtgggtaacgccgtgctgactagcag

SEQ ID NO: 13342 - DNA, 1037 bp, Homo sapiens
ttttcattttcatcagcaacagctgccttaaagccagttaagactgtggtcctagtctcgcaccctggggctcctgctggggtgggtgaggggaacaccccattaagctgggggaactggggctgccaccagggggcgcgaggggccttcgcccgagaagaggggtgggcaggtgcctccagcggagaagggcgccgtggccggaggcacaggtctccccggtgccacttcaagtgagttcgaggaagtacctgggatctttgatctaacgcgaaaggccttcccagtgacctcttgagagctgagaacccactccctccacctctagtccacggctttgccactccagggcccgaggttacgtttgctgctggggatttgacaaacccaaagcctctctggtttcaccactggctccttagaatcagacatctgttctgaatgacacttatgtgagtcaggggctgaggacgtgatcctcgaagtgtggtccccagactggctgtatcagtgtcggcatcccccaggacctggttggaaatgcatattctcaggccctactccagacctcttaaatctgagactggggctgcggggagcgccatctgtgcgccactatccttgtgggtggaccaggagtcggttcgagggtgctcccacttagaggtcacgcgcggcgtcgggcgttcctgagaccgtcgggctccctggctcggtcacgtgggctcaggcactactcccctctaccctcctctcggtctttaaaaggaagaaggggcttatcgttaagtcgcttgtgatcttttcagtttctccagctgctggctttttggacacccactcccccgccaggaggcagttgcaagcgcggaggctgcgagaaataactgcctcttgaaacttgcagggcgaagagcaggcggcgagcgctgggccggggagggaccacccgagctgcgacgggctctggggctgcggggcagggctggcgcccggagcctgagctgcaggaggtgcgctcgctttcctcaacaggt

SEQ ID NO: 13343 - DNA, 1036 bp, Homo sapiens
atatgcatgtaaaaatgccagggagggttaattcatagcaatagttactatttaacctactttacttgaggttgacaaagaaatcattttttaaatattaatttctgtttagtacagattgtccttagtcagggctcctaaacagactgcaaagttctgattgtataattacatactattgtaggatgaaagagaattggtaaacaggctcctgctgtggctatagtactagactgaagtaggactaaaattgctctaggactttctctggtagagaaggtagacctatcaatgggggaaaaagtcataactaacatgatgtagaatttttttaaattgtcatgtatatgaattgagaaaaaaatcatgctatggatattatgagaccagtctccccaatggaataaaataaagtacttgaacagctgccatgttagcatctgtttgtccatatcatcatccagttaatagaaagacataattcccactcctcactcaatatatagatggaagtggtttttatggtaaataaaattagattgcaataagacaaaagtaatgattcagggcttggttaatgttaagtttaaatatacatatcatgttgagaattttctttgaacacataacaaaaaaaaagtgctactgaatgaacattattgcaatgtagtaaagcagaatgcaaattccttgaggtcagcattcaagtctgttttcctcgcagcggtgcccacacccctagcatactgcctggcacacagtaaatgctcattaaatatttgtgaggtacatggacaggggaatgtggtagacagctgatgaagctgttctcccactgttcccctaggtggatcatccaaagtcaatcgattctgaactctgaggtccaagttctgccctcccccttcactctccccacaagtgggcgggacaatcctcccatgacttaagcacaggtggacaggggtggtcagagagaggaaggggcactcagagatccagcaggtgctgcaccatgagtgtctctgtcctgagc

SEQ ID NO: 13344 - DNA, 1033 bp, Homo sapiens
attctcggactcagccttttaccctctgtctctctctcccgtccgctggacatctactcccttcggtccaggctcctgggctcctgtcccaccgcacccagaccggagctcaggcttgttggggttcgtgtcctggctttgagtgcctggggtgcagactggacccctaggcgagcacgtgggtctagcgcaagagcagaatgccccctgaccccaggggctgcctggggaagcgcgcggtggacgggaagcgcagggtccgggcaaccctctcgagccattcttttctttccacactactctggctctgcaccacctctccggagccgccagagtctgcgcgaggctgagctggggccaggaccgttcctctacgctggcagagttgggtggaaacttggagacaaacggaatgcggagagcactggggtctgggaaaccagcctcctcgccgctgtctcccccaccgcatgccacggctgtctccaggtctcagacggaaatctgggcacctactcccctcacccctacctccaccccataggggaattcaccatctgaaccggggtctcggagaacgtgacctctcaccttccagggaggtcgccgggaggtgcttggggtgggtggaagcgtgcagtggcctctgctcatattttctggaaacccctccgttccctgggtggttttagacgtgcgaaccgcttgttttgtttccaaaagcaaaagatgttccgttgcaggcgggcccggctgggcgctgggcactgggcgctggtcctgcaggcggctgctgccccctctcggcggcaggcggcgcgaaggctcctgacccgcgcgggcggtcgggctgcgggcgctgggccaggccgggccttccgctagtgcgcgggaccctccctctgcgcgcgcctccgtcgctcggcccagtgcgttcggcctcacgcccagcgctctcctcgcaggcagaaactccgctgagcagaacttgccgccagaatgctcctcctgttgctgagtatcatcgtcctcc

SEQ ID NO: 13345 - DNA, 1033 bp, Homo sapiens
gaggaaggaggtggctttgtttccaactgccctggaagacctcctcatccccctgcatccccagcctcctttcctttttccttcctgctctgctcccttccttcctctcctcctcttgggaggtggccagggacataggtcagtgcctggccccgaggaagacacatgcagtttgtggacgggtcttgggatgcggacacccagagtcttgtgcaccttcctggagtgttgcccactccagtacccactccctaatctcccctcttcctcctcaatcctctcttgcaggaagcagaggatggagaaccccctcaggaaggagggcagtgactctgggtttgcctagggctaatggcctctcaccgacctgtgcccttgtacctgtcgcctgggcaaacagtgattgcatcagctttggtttctcatgggtgggcagccttggctgtctgccggaacgtaaagagcatggagcaaggacatgggaatccgaatcccgctgaggtcccaggaccacttcatccttcttccctgtgcctctcctccccagcatgagcacagcagcctgatggagaaggattttccaatgttagaactggaaagaacacctgtagcctgtctccaccgtttacagtggtgctggaagtgaaaagatgtgttccaggtcacaggcaggtagacagcggagccagactgaaattcactcctcctgatttggagtttagagctcttctttggcaacattttgatgaataaaatcacaagttctgtgtcttttgaaattccttgtggagcctagtgccatcctctgaacttggagccaactgacctttgtccttggggcagagacatggttcatgggcccaatccaggtcctcaaagggagggcaggtctgagtccttgccctctgaagtcagaaacctcatctcccactacagacctgccagggcccaggagagctcgacccacccaggcacaccatagccccagagatggctggggacacagaagtgtggaagcaaatgtttcaggagt

SEQ ID NO: 13346 - DNA, 1033 bp, Homo sapiens
catcccctagtgaaagtggagattatagtggttaaaatgcctgttgatatatctaattttttttgttttttgagacgaagtctcgctgtgtcgcccaggctggagtgcaggggcgcaatctcggctcactgcaatctcccgggttcaagtgattctcccgcttcggcctcctgagtagctgggattaccggtgcgcgccaccacgcccggctaattttttgtatttttagtaaagacggggtttcgccatattggccaggctggtctcgaactcctgaccttaggtgatccatctgcctcgacttcccaaagtgctgggattacaggcgtgagccaccacgcccggccgatacatctgattttttaaaggccgttttgttgtgcgaagatcattagttagaatgcctggctgggtaaatacaaccgatgactgctgacgatatggaacaggcacaagacttctgaacgatatgtagaataaattataacttatctagaacacaaggtaacagtggaagataatgagccaggtggaagttacaaatgttgccgcaagtagtttctgttactttacgagttctgggagcttctctaacagctttgacaggagtgaatccccaaggctaaacccaaatccttatttgccgcctactcacgcctttgtgaggactacgattcccagacggcaacgctcccttcactcaacttccttagctggcggggagacgcagtttacagaactacctccccaaccgaatttcacacacctgtcacctaggacgcggccgggaaggcctcccttcgatccgcgttctccccattttggggtgtagcttggattcctgagcccagttttagtgcgtggccgaccgggaggccggcgaggcgctctaggccgagcggcttcgtctctatgaccacaaggggcggtccccggtgtcctgcgcgggggcgcggagggggcgggcgtcagttccgcggggggctgtcggggaaccatggctgccccgagaggtgagaactgggtctgctg

SEQ ID NO: 13347 - DNA, 1030 bp, Homo sapiens
aattcaaaactaactctgccgggcccgcgggggttgcgagacagggaccgaacgtgaaacccggggagccccgcgtctcttgcctccgaaggttttccgtgatcagtgtccccttctctgctggagtcggaagtgcctgtcacctgcggatctgcccgactctcccggtcggcccttcttctctgcccagttcggacagtctcgaattccccgtcgcagccccggccacctcggactccctggtccccagcccccgccccaccccccgcctccaccacgtcccctccccgcggtcccagcctctccaggcgctgctgggctctgattggcggctgcgctgacagcaggcggggcctggaagtcgcggccaagcccgccctcgcgtataagcccctctcagcgctctctctccatctctcccctctctttctctctcgctgctcccttcctccctgtaactgaacagtgaaaattcacattgtggatccgctaacaggcacagatgtcatgtgaaaacgcacatgctctgccatccacaccgcctttctttcttttctttctgtttccttttttcccccttgttccttctccctcttctttgtaactaacaaaaccaccaccaactcctcctcctgctgctgcccttcctcctcctcctcagtccaagtgatcacaaaagaaatcttctgagccggaggcggtggcattttttaaaaagcaagcacattggagagaaagaaaaagaaaaacaaaaccaaaacaaaacccaggcaccagacagccagaacatttttttttcacccttcctgaaaacaaacaaacaaacaaacaatcatcaaaacagtcaccaccaacatcaaaactgttaacatagcggcggcggcggcaaacgtcaccctgcagccacggcgtccgcctaaagggatggttttctcggcagagcagctcttcgccgaccaccttcttcactcgtgctgagcgggatttttgggctctccggggttcgggctgggagcagcttcatgactac

SEQ ID NO: 13348 - DNA, 1027 bp, Homo sapiens
aggattggggcaaatttctacatgtaaaaactcagagggcaaatgaagacaacaggaaatataatctagttggataatgtatatcttcaacaattttgctcatattaaatatgacagggattttcttggttgggtatcacaacatcttaggatgtaggctgataacagtattaagctcagtttaataaaatcaattctattagaggataccaaaaagatatgtttttacaagattctttcatgatttgagtgctttctacttatggtcaagttttatttattaaagaatgaggcatttaagctgaacacattcttcaacaaaaggctaccttatttctggaagcagatatactaccagctgtgtggccacagctgactcattcaacattccttaggttcagcttctttgactttaaaataattttcataacctgaaactgacagctacgttttaatgactagatatcataacatatatggtgaaatggactatttctatttcttctctttagagtagaaatgtgaacctcattcagcaaaagttttgtttgtacttgtcttatgtatatgtctatagaagcagcattctaagaaatatttagagtaattggttcaattgttgattggcatcattgtattatgcagtttgtctatgaaatatgcatagtcttaactcatttattttatagagtggttccctgtgttctggtaaaagctttattttcaagacttctttataaaataaaaatgtaaagaaaaacctagctgtaagacaatgtagcttttgaggccctgtaattggaatgagtccactttaaatcctttaaagaggatccactgtagggcaagtctggtgccaacagctgcggtaattccagctccaatagtgtatattaaagttgctgcagttaaaaagcccgtagttggatctcgggagcaggcgtgaggtccgctgcgaggcgagccaccgcccgtccccacccgttaactctcggcgccccctcgatgctctagccctggatgtact

SEQ ID NO: 13349 - DNA, 1027 bp, Homo sapiens
ggtctccctctttctggtttgtttttttttctagattcctgccgtttgttcatcgttgtgcctaaagcatgtcgatgtggcgtcaagtacatcgtccaaatccctgtctcttcagcttctctgatgcttgaactctcacctttgaccttgtgttgacctttgatgctgatgtgtatttttattatgtttgtttctttcttcgtttttttttctttttttctttcctttttttttccttttgtgctgccaaattggttttgctagaacgactgctgaaggggaaatatttaaacttgcatttgaatataaaaaaaatctatttttctagaacttcataagataaccacttgattttgtgattccaattctttgtaattgtcttcagagcagccctactagcacataccgcgtggtgtttgtatttctgtgaacacacagccagtccgtttctaggctttgtttctctgtgtgcttagttttaaagacaactttgaagtaaacaatgaaataaaagatgtcactaaaacctctgaggctcctgagcacattttgctgatacagtctgtggggcttgaggagaccgcatgtattgttctttcttttgtttttcttctgagttctcaactgcggagagcacctgaaccccctttcctttttgaccgcaggctgcactttgggccccagccagccctttttctttttctttttcttttgtggttcttccctggagcgactctggggagtcctggatatcccgcctgccccttcccctcagccccatgcttgttccaacagtctccacagcaaaatgtgatgctttgatttttttgttgttgtttttgtttttgtattgtttttgtgtttttgttttgaattttttcctttcctactaagattatgcccagaaaaaagttttgcatgtttcctgctgtttcttcacaccttcgtatatatcaccttcacctctctgttttctatagtttgtgcaaaaactgatcgatttaaaagggtttcaaagaagctgttt

SEQ ID NO: 13350 - DNA, 1027 bp, Homo sapiens
agcaccttgtattggtaaccagccggagggactggaaatactcagatgtgtctgtctcccttattaggttcaaagtccctcgagaccctgtctccatcacagtgctccagtccagacccctcctctgagctccagaccctgctggacccaacagccatccccatccccacctgcctggaattctccaaagaacctcccctttaacagttccagcctttaacagttccagtctaaacacatgacctttctcctctaaatcagccccccatctctgcctttgcaggagatggaagccatgacacctgcctcgcccctgtcctcaccccatccatgtccaatcaagcactaggcatgtcaggtttaccctctaaactcctctggaatccagtctctcagtctccatcatcccaggtcgaagctaatgggctaactggtccttgcttccactctacccccactgcagtcctgacttcctgagcagcagccagggcctaatccatattcacaccaagcgccttcctgactgagatatcctcctgcaccatcatccctccaccctgtttagttctgctcaccctcagtgttctcatcaataatccactcgccctcacaggcgcgtttgggaccccatgttctatgctctcacaggaccttttgcttgatttttcactgtactcaggtcagtttgcagttattaagtgactgagcaatgtctggcttctccagtagactgtcagctcctagccattgtatccctagcaccgctgtgtgggagcacttcacaaacgtccattgagtcagggactcagcagtctccatttctcctccctgctggagaatgcgtgtattttgcaatccccagcccctgtgccatctaaccatcttttcttctctgttcagcccaggtgtggcctcactcacatcccactctgagtccaaatgttctctccctggaagatatcaatgtttctgtctgttcgtgaggactccgtgcccaccacggcctctttcaggtgagtcaaaggga

SEQ ID NO: 13351 - DNA, 1026 bp, Homo sapiens
acactttaagaaaggtctggccccagagaggcaggatccgcctagcccagtgagtgaggccgtcctgacacctcgtcaatgcccttgtgtcaacattctagaaaacggactcctggctcattgctccgcctagagccgcgccacctccaaagggtagcaccggccacccgctccgcaaagtccactctcagccgcgcaaaactagaaggtagttgtcccgaaggggcctgagcgctcactcagtcagccaatggccacggagctagggcgggacctgagggtatcctgccaatgggagtatggcagggctggagggagtgcctgggtctcagggctgctgtggagttcgcacctccagctcgggccgatgtggaagctttggagagctgaagagggcgcggcggcgctcggcggcgcgctcttcctgctgctcttcgcgctaggggtccgccagctgctgaagcagaggcggccgatgggcttccccccggggccgccggggctgccatttatcggcaacatctattccctggcagcctcatccgagcttccccatgtctacatgagaaagcagagccaggtgtacggagaggtacagccccgacgggccccgggcagggagggccgccaggctggcccgggctggccagggccttcctggttggacttatggccgcccctgggccgactagtcgggacctctccgtgtgccggctgccctttgagggacacccgcttcccgggtctggaagggagaagtcctcgacgccgtgcccccttgcagggggagccccgcccctgccggtgacccactccgggccgaggctccgaggcgatccagtcctgattttcccgctaccgctcgagctcttgctcctgcgcctgcgccgtttggctcgccagccgcgccgccacttcaggtccagggtggacgcatgccctcaggtgcgggcgtcttgcgagtcggcctcgcagctctgtggaagctgcacgcggcttgtcggaaaatcaaggcgttctgagttc

SEQ ID NO: 13352 - DNA, 1023 bp, Homo sapiens
tttaaatgaaggagctcaccagccagcatcttagtatttgagcccctgctttcccaataactgaccttatacctttctctaatccggagcctccctctacccactctcaactccccagtagagttgaattccagagaatatcctggatttcttagaggacattatgttctagcttgcagcaggactctcgttgtttgaggtccagtcaaccagagctgtcttcagatgattaaaatgtgccataaaatgaaactgtttaatttctctggctataagtatgtcttttcttaaagatcagggcaaaagcacaacgttagcatgattaataaaagtagcaaacactcattctgtgtattccatacatccataagtacgtaggcttagcaaaacctttcactttctttcctggccccctggtagccgaaaaccccaaggtgatctgcgcatacgagttcccactttttaaacctgcaaaaacaaatctgacctgctgtggtcttctggggactccaaagttgtaatatttagcccacaggttgcctacattcttccccttcctccatctcttttctagcctgattaaaattgatagcccgagggaaagagagggactctggatttccaccctcctacccagggcgtgttccctgcccgtgactcagcctgtgatttagggcgtctgcagggtgaggtgggtggaaggtgatgcccgccccacctcacaggaattacagagcggtgcgcttacctgcgggactgttatgtgcgctctggcacaggctgactcatgtgtgaagtttaaaggtggggcccctgccgcagacagccttcctcacctgagtcaggcaggcccgggcactgagcaggaagggcaggtataagaggaagaggcagaggttcctgcgcagccagcggacgtccaggaaccgggatgcctccagcagtgaggcggtcagcctgcagcatgggatggctgtggatctttggggcagccctggggcagtgtctgggctacagttcaca

SEQ ID NO: 13353 - DNA, 1023 bp, Homo sapiens
caggaggtcctgaagcaaaaagcaccgaaggggttaagggtggccgggggagcccagccaccgccccttcccagcatcgcctcccagaatcccgcaggcccccagccagttctcgcacctcgcgagactccacccagccccttccccgaacagcgacccgtccccgttcctagctgaggtcggtgctaggcggaggacgcgagagggagagcggaagggggccgccgggcacgccgggaagtgtggtccacgcgcttcacgcggccatattcttccggagcgggggaggccagagaggccgttgggactacgactcccaggcgccctttcggtttgtttttgttcaaaaaaaaaaaaccccacactccccctcctcactcttcacacacactcacacacacccacggcagacacgcacgcacccgggcgccgaagggaaagccgcgtctcgccctcccgccccgccgtcggtcctgtctcagtccctcagcagagcgggaaagcggaggccggagccgtgacctctgaccccgtggttatgcggagccgccgcattccttagcgatcgcggggcagccgccgctgccgccgtgggcgactgacgcagcgcgggcgcgtggagccgccgccgcccctcccccaccgccgctctcgcgccagccggtccccgcgtgcccgccccttctccccggccgcacccgagacctcgcgcgccgccgctgccacgcgccccccccaccgccgccgccgccccagccccgcgccaccgccccagcccgcccagcccggaggtcccgcgtggagctgccgccgccgccggggagaaggatgaaggacaaacagaagaagaagaaggagcgcacgtgggccgaggccgcgcgcctggtgaggcggacagccgaggggggctccgtggggcccggggtggggggggctcgccgcgcacccccccactggggggggaggggcaaggccctgcccaccgcgggagggggcggggccatcttcctttaagaacgggac

SEQ ID NO: 13354 - DNA, 1022 bp, Homo sapiens
cagcataagctctgtgagtgcaggcggccctgggcactggagccttgttgcatggacgtgctccttgcacccttgttgatgaatgagcgaaggtgtgtgggagtgaatcccagagggtgcaggccacggcactgggggaggaccctcccggctgcctcccagtgggcttcaggggctcagatagaccctgccgagcacctctgtcctctgctcccggactggggctgcagagagctctcaaggggccttgggaggcacaagcaggccagggtcccagggaggggaggcaggaggcagcagggccggatggtgggctgcagaggtggaaggaacaggacagtctgttctgggggtgctggctgtgggggacagaggccaggccacaaagcagaatggtgggtgggccaggaggaggtgggagcctttttcaaaaggctttcagggactttttatatttaatgattgaaacaaaagatatccaaaaccgcagttcctgagaaccacttgttctcgccctggttcctctccttgggcttgaccttggcctcctgccgggcctggcagcggacagcagtctccctgcttcccaggctgggcgagggagagcgtgggtccccaggaacgggggaggtggtgcggctggctttaggatgcccattctggaaccttctggtggaagaaagcaggggatcagtatagtatggttgatccacacactccagaccctctcctggctgtgcagctggtctgatctgggctcagaggctgccactgctcagtgctcccctgggtaattttgcaggaggccaggagggttcctggcagttagtgccacccacacggagaaattcagagccatataaacgggtctccagggcctggagggactgcacatcctgggcctgcggcgcagtgtagacctgggaggatgggcggcctgctgctggctgcttttctggctttggtctcggtgcccagggcccaggccgtgtggttgggaagactggaccctgagcaggtac

SEQ ID NO: 13355 - DNA, 1020 bp, Homo sapiens
aagctctttaatgggtccaaaccccaggtctggccaggcatggtggctcacacccataatcccagcactttgggaggccgaggtgggcggatcacttgagatcaagagttcgagaccatcctggccaacatgatgaaaccccgtctctactaaaaatacaaaaattagctgggtgtggtggcaggcgcctgtaatcccagctactcgggaggctgaagcaggagaatggcttgaaccggagaggcagaggttgcagtgagccgagatcgcaccattgcaatccagcctgggcgacagagtgagattctgtctcaaacaaaacaaaacaacctcctcggtctgaggaggggagactggtgaggctaagttttgaattcctggccctgtagctgtcagcccagccagcgagttttaaaaattgggagaaggccgggtgcggtggctcacgcttgtaatcccagcactttgggaggctgaggcaggcggatcacttgaggacaggagttcgagatcaacccggccaacatggtgaaaccctgtctctactacaaaaataaataaataaataaataaataaataaataaaataaaaaaaattagccgggcatggtggcgggggtctataatcccagctactcgggaggctgaggcaggacactcgcccgaacccaggaggtggaggttgcagtgagccgagatcatgtcactgcactcccgccctgggcaacaaaagcgaaactctgtctcaaaaaaaaaaaaaaaaaaaaaatcgggggagggagatttgaaggtcagagcacagagtgaaaaggtcgcagcgtggtcaagtttggcgctagcgacagacccagcattcctcccagcgcacgccgccgcccgggccgcgctattccgaaattgggtccgccctagcgtggcccccggcctgctcctgcgctcttcgcgggtcgctcacctccgcctcccctcgacacagcccgagcccatccgccccccgggtcgacccgcgtttacctcagg

SEQ ID NO: 13356 - DNA, 1020 bp, Homo sapiens
acactggtgtcttgcctgatttttttccagaaccttaatactgagtcttcatacccattttcctcactggaacctccctgagcccttacttgaggcaacatgtgtgagctcttcacctgtctacatgtctgacctgctggtcagccctgacaccagaaccccacgcttgagtcacttaactagcagcagagtcagactctgagaccatccctttagagggagcagcagaggaaatgggagctggaggggaagggagtggtggagatgggggtgtgaactgggagaagcaggcatgggggaaaactctgggctgtcagcccctagctatggtcgggaatgttcccaggcagcactgacctttcacccccacccgcctcggtgcgatgattggctgtctctgccatccccgcttccgggaccagaagccacctctggagcaactggggcatccccatggcaaccatgccaggccaggttgggagaggtgtggggctccttcacagccttttattgccccaaaacaggttgacactctcgtcctggtaaccctcagggccctgcagatcacagtgtccagagaggaggggctgttgctcctagcaggtctcttgattcaggaaaaagcgtttctctggtctcagccagatccttcctgggctgatctgttgggaaacccaagctctctgtccttgggcccctagcccctaccaacaccctcctagcgcattctagcaggagagcgagagggagtggagacagtctgaactcttccctctgcccacctgggtgtgggcttggtgagatactgaggctggggtgtccacctgagtccgtggagggaggagcgactacggtgcggtgggggcgaggccactcagggctttgtgacctagacagaggatttatgtgggtgattagctgtcacgttgggtctaagctccttaccctcagaacctagctttcctgcctgcccccagggctaatccagaggtgggggaggggctaaagacactgggctct

SEQ ID NO: 13357 - DNA, 1018 bp, Homo sapiens
atgatttctgactcctggactggtactttgccacaggcctttccagccctcctcagccccaatccctgaggacagtctgtggctgccccactgggagatgcccagcgttggaattgctgaaggaggcctctccaggaaggcttctccacttgtgtgccctcccatggggccggcctgctcctaccccacccacttccccttctccaggataagcccgctgcaacagctccgtctcccagtgtctcagcctctctggctgctcagcccagcctggtccagctggctatgctggcatggaccctagtctggtggccagttataaatagcccctgcacccacagccttggcagggtgctcctagtgtgggtgcagaggacacttgagaagaggcagccgtgcctgccatcctgaccatgccaggcccagagctgccatggaggcacccaggagcaggcccaaggacacatgggccctatgagctgaggaacctgccctgggcacagggttctgcaggcccaacgtggccggtcagggctggctgtaggcttgaggcatcactttatctcatgactggggatagagcatgggagggtggcgacccagagggcctgtgaggcttggggctggaggcagaacaaagtgggcctgtttgcctgcctgattgcttcctttgagcccaactcattagagggcagctgggcaaatcctctgattccagggagggatgaagggagggagaaggcagggccaagaatgtcctaccataggatctgcagcccatcggagatcactgtagccctcagcccccggcccagggaggagcatgtttagtggaggagcactgtggtggagtcggaagactccgttcaaacaccaccagtgatacagtgttactgtgcacagttcatgtgacttttttctcacgagtaaaatggaattgataatacctaccttgcaggaccacgacaggattaagtgaggaaaaacccccatgagagtgttttgccattgtcaagtg

SEQ ID NO: 13358 - DNA, 1018 bp, Homo sapiens
agtcaggcccagctaatcaaactctgggcccaggccatgcaggagaaaagcagcaccaggatccccagaagcctcgtcctcttggcccccttcagagccttcactgcaggcctcagtgtgggccactaggtctgggagcctctccttctcccaatgagtccagtgcagcatctctcctctcctcttccccaccatggcttctctgcctccaggcactcctccaggcctgccccttgccccaacagatgaggagcacgtagaagcatcagggggtcagggagtcctggcaagagcagcaagggttaggggcaggggccgagcaggcagaggcctcagggaactgaacagtcactgggaggagtctgactgcatcctagagaagagacacagtcccccaaacctgccctctccatctcccctatgcctgtcacctgtcttaggtagaaatcacaggattctaaagtcacaaagacttgggtccaaatcatagctcacccatttattgttcttgtgtgagtccttgggcaaaatcattaatatctctgagaatccctccactcactgatcaatctggaataataatgtttccctgtggtgggtgctgtgaatatttacacaaagtaaaagcatggatttacataaagtgtcctgcaaagggcccagcacacagtaagtgattaataaatgctagttcccttcctttctcctgtcctgtttctcctcaaggctccatgcactggtccactggtctctcctcatgtcccctcctggtgccaggacactctgccagccactccttttccctgcctgctggagggccaggtgctcccgccttccaccctccgccctcctccctcccctgggccctgctccctgccctcctgggcagccagggcagccaggacggcaccaagggagctgccccatggacagggccccacagagacagcaccgagcctcacggggtaagaggcccatggccctgcctgcaggtggaagagactgctggaggttcaga

SEQ ID NO: 13359 - DNA, 1016 bp, Homo sapiens
actgatgaaggaaattatcgccaaggtgtttttatccgtttatgaaagccatactttgtatttgggttgctgcagctgctcaaaacaatgggagaaactgcagttataaattccagaaaagcctgtgaatggagtgaaagtggagtgggtggtcaaaaaccaatggccgtggaggcttagctctcttcacaaggcacacagcaggtgctcaatgagtgcctgttgaatgaatggccacgcagcccaatgcgtgcctatgcacccctcctcctccaggcagccctccggaggtccagcctcctccccaccctcttggcccgccccgccccgcccgcccttacaggatgtcttcgcggatggaggtgccatggttgaggttgtggaagcggacggagacgcagtccctgagaatgaaggagcacctgttctcccttttgtaggcgctgaagcactccttgaagtcctcataggtcttgaagcagctgcccagctccatggccgcccccacaacccacactaggggctggtcccagcccgggcccaagatcacaccaggggtcaaaggtcacactatgagggtttataggcaggcgtgggcccagaatgccttaagggtccgccccaactgggtggcctattctggaactcagggaggaaccctaggcctgaccgggttacaagaggaagggggtgtatttgctatctgacaggggaaatgacactcagtccatattatccagtcccgaggttccgcctcctcagcgacatatccagtcacacacaggattcgcagattggcattcattttctccaattgctagagaaagagggccacagccaccagcggactgacaggagtcctgaccaatcataacctagattcctccttcccggggtctgcaggagacttccggttactagggcaatctgccggaagagtcaggttctgtgtatgtctccgcgtcttccgcggagcgggtgtgcagggcctgcagcattgaactagatgtcgtccc

SEQ ID NO: 13360 - DNA, 1015 bp, Homo sapiens
atgtgctttttctggagtggaaaaatacataagttataaggaatttaacagacagaaaggcgcacagaggaatttaaagtgtgggctggggggcgaggcggtgggcgggaggcgagcgggcgcaggcggaacaccgttttccaagctaagccgccgcaaataaaaaggcgtaaagggagagaagttggtgctcaacgtgagccaggagcagcgtcccggctcctcccctgctcattttaaaagcacttcttgtattgtttttaaggtgagaaataggaaagaaaacgccggcttgtgcgctcgctgcctgcctctctggctgtctgcttttgcagggctgctgggagtttttaagctctgtgagaatcctgggagttggtgatgtcagactagttgggtcatttgaaggttagcagcccgggtagggttcaccgaaagttcactcgcatatattaggcaattcaatctttcattctgtgtgacagaagtagtaggaagtgagctgttcagaggcaggagggtctattctttgccaaaggggggaccagaattcccccatgcgagctgtttgaggactgggatgccgagaacgcgagcgatccgagcagggtttgtctgggcaccgtcggggtaggatccggaacgcattcggaaggctttttgcaagcatttacttggaaggagaacttgggatctttctgggaaccccccgccccggctggattggccgagcaagcctggaaaatggtaaatgatcatttggatcaattacaggcttttagctggcttgtctgtcataattcatgattcggggctgggaaaaagaccaacagcctacgtgccaaaaaaggggcagagtttgatggagttgggtggacttttctatgccatttgcctccacacctagaggataagcacttttgcagacattcagtgcaagggagatcatgtttgactgtatggatgttctgtcagtgagtcctgggcaaatcctggatttctacactgcgagtcc

SEQ ID NO: 13361 - DNA, 1015 bp, Homo sapiens
ctctgagagggaaatgtcctgaattttccctgcagagggaaggtcacctgcaagcctacattcgtgacagcgttcccgaggaccccctgatcctcatcttcttttctgcttcatcagaccagagaccgtggctaaaagccccccatctgccggctctcaggggcttccgaggcggcggggcgggaggcggcgcccagtcaaggacaacagaagactacgtcgcgtgggccaaaggaaacagtcccgtcaataaataagcctctggccgacgcacctcacccttcccatccatacaagacctcaccttctccccggagccgcggaggctgttctgctaaactgtctggaccacgacgaccccctaggaggccgggtcgcttattcaatatggcggcctcggctaactctgtcagccgggcctggagaacggaaagcccggagggactagaatccttgcattcgacaagtttgtcggcaatttccgtcagccgaccagagggcggagctgaggtcggcccagcccggaggcgggaaggacaacttggacccgcagttccgccggaagtggccccagcctcgaggccgggcgtcttcggtcatctccggcgcttctagggctggttcccgtcatcttcgggagccgtggaggtacgaacttaagacatgcctattttattaatttacttccaaacgcaacgaaaggtccatggacaatttgtgggccatttaattcagggcccccaattcgtacgtggagaagtgggaatgcaaaagtactttgacctttaaccttcggtccggcgcggtggagggaaacgcctccgtctctatataaggaattttccggtctcttcgggtcctttttcctctcttcagcgtggggcgcccacaatttgcgcgctctctttctgctgctccccagctctcggatacagccgacaccatgggtttcggagacctgaaaagccctgccggcctccaggtgctcaacgattacctggcggacaagagctac

SEQ ID NO: 13362 - DNA, 1014 bp, Homo sapiens
acaacagtttgtatgctgctggaggttctcgcagcacccactatcctaggggcagggatgaggagggtgggaaaagagcagcgttgaatcctgttgcacgtccgactatagccactgctgggtcggcgtcaagggtgaaaggtcagggtcagcaggctctgcccgccattacctgaagtgaaggccctcggccaggatagtgtcctgctgcactccaccgatccgattgaagaagatggctctgtgcccgccttccactgtggggagatgggtggtgatcaggccaggccgctgctcagaggaaatgctaggcccgtggaggggcgcggggacagggcaaggggtttgggggagggactggaagcgtccggcgagcaggcggaggttgctcaccggtgaacacagattcgcgcacaccgtaggccacggcgccggcccccagcaacagcttcagggccgtgcccatgccccggggcccggcgggcagccgtcccgccaagtccttcaagttctgggccatgtctgatcttgaggccggcggcactggaggtcagaagggggtgccggcccgcctctaccccgctccggcttaggtactgcacccttcacacgagggttcgggcccgtaaggctggcgaaagaaagggcagcggaagtgcgctccctttgaaaccctcccccttagcccactacggacccgaacttcgcgcacaggaatcgcgcatacggaagtcccgcccctttctggaaggctgccctcccagggagggcagcgcaagacagcaagtcatctccatttcctggcccactttcaaaatggcagccggaaggaaatttgtgattagaagccgcgctgttcttatttaagagcgttagcgcaacttccggtattgttgcaagatggccgcgcccagtgatggattcaagcctcgtgaacgaagcggtggggagcaggcacaggactgggatgctctgccacccaagcggccccgactaggggcaggaaacaagatc

SEQ ID NO: 13363 - DNA, 1014 bp, Homo sapiens
tctattagccagcagctacaccctgacctctgaccctgacattggcccctggcattggaccctgacattggctacaccctgacccctgactttgatcatgtgaggtggcccgacctgctggtcagcttgagagaaagctggccaggaccgagcagggctctctggtcacccctgctcccccaacaggaggcttgagcttgaagtacagaaacaagcccgagttgaacctaagatggcaaaggtgaaagttcagaagcgtgtccatcagcagcctgtcaccacaggacgatgtacaaaccatgggggctttcagcacagggatagccgttgtcaccagacagttctgctccttaatggaaaagacgtgtcaaaatatggcttacaaaatacaaaataatggactgaaatgtacattatatgagggtgttagattgcaatgtactttacagtgggggaattagattgaagtgttatgccagggtagttaggttgaaatatggattatcccaggaatgtcagcttgagatgtgctttataacacagttgttcaattaagatatgctcttcagtgcaggcattagccaagagatgtgcattatagccaagttgttaggggaagatgtggattccactttgcggggaggggcgggtaggagagaggaaaacaccttgggttgaatattattcaaggttagggaatgtcttctgcattcgttgggtttcaggggtctgaatacgtggagtaggacacagcgtggtgtataatgttccttcccgtctcctttctccccagccaaacaatctgccactttccccacttttcctgttagggacttaaaggcttcccccatcaataaaaacattagctcactaaacagcctgatggcttttccttccctggcttaacccttcgggagctggggtttcctttggatttgtaaagatattgattccagataatgtttgcctttctaactctctcttccttagacttgatggataggttcagggcta

SEQ ID NO: 13364 - DNA, 1014 bp, Homo sapiens
ctgtgggatggaagatttttgagctgagatttgtctgtggctaggccagcagtcatcagatactgtatgtcaggcaagatgcctatagcttaaaaaagactctagaaggctgctcaccaacacagtggaactaatctccaggcttctgatactagagattatgttctttttctctggattctttggacattcgaatctttaaatgatcaggaagctgaccctccaatgttccccagagctacttcccagctctcacagataaaatcccctaagcttcagaaaaggagtgtggctctgcggttgctactgggttgatgcagagagcacagagcaactgcacagcagtttctcttgtgtctggtggatagctaagcatggggaaagatcaagggtatgggggctgccgaacttcagttccaggtcctggctgtgtgacctcaggcgagttatttgacctctctgaatgtataaaatgggaatggtagagcttctgtatcacaggagtacacaagacaacacgtagaaagcacttacactaacaggtaatcaaaagtcagttttctccctggggatgtgagcagccacctggaaagagggttacttaatggcatagcgcagtgtgaatctccctttctgtttctttgcttggcattacccgatgattaattttgaaaagttactcaaacaattacaattcaacttggtcaacatcagttctcacaaatagaagctgactgtcatttattcactcagttcctgttggctgagtgttggctctagggctggcaccaggcactggaattaaacattctggactccagaggggcatgaaaactcttcctgaaggagatgcagaggaagattcgaactggaggaaaaccctaaaatgtgagtaggaattggtcaggccaagaaaacaggcaagggtgctcctggttgggggaatgttgaatgccaaggcaacgacgggagcagggcaaggtgtgtgggcaaagtggagctctctatgctggg

SEQ ID NO: 13365 - DNA, 1012 bp, Homo sapiens
taagttgggtattgggaagcaaaggacgatagaatattaaagtaacatggaccctgagagatattcatttatgattcatctgcttgtggaagaacttcaaacaattttccagtctttaattttaaaattagtgttctcgttgtaagaagagtatgtgtgtgataggagatagtattatgaccatttgtggaaaaaaaacaacctaccatgctcaaacagcaggattttcagaagtagaatagtgtgccagatgtttattttcaacgtgatgtcaacacggctcctatcttcattttcttctccattgcagaagataagtctgaaactacagtttctgaagcctgtttctccataacttgcttcttccttagattcccccatgagatgtacttaaagaagacttggaagaagagaaagacaaggcattatctgtcagcagctgctggtagcagctgagatcaccaacagtagctttccttgcttctggaagttttcctgagaaacatccactgcagcaccatggataattagtgagggcatcactaagattcctgaacttcagaattttctggaaatagcatttctgacctttgtccctcaatgcttccaatagttgcagaagcctttcattccctgtattaaaactctctttacttaaaaaataagaaataaaaatgaattaatgttttatgttacttttggagttggtccattactgtcactaaataaagctgtacatgtacataccagggaatcaattccagagatgattgtgaaaccactaacaagaatcattgaagcattttgcaaaactctctgaactttgatatttactaagtgaccttaaagccctagctttgtggtagtgcacttaaattcagaatcacacttggtaactaataatgaaagatttcaaaccccaaacagtgcaactgaaacttttgcattactatactactgagaatatctaacatgttgttactaatcaatgtcattctgaccttgtgggttt

SEQ ID NO: 13366 - DNA, 1012 bp, Homo sapiens
tacttcctcctctctgccacatcaatctgccgggggatcaagtcctgttccagtttatggttcccaagaatggctggaaaagctatgtatggaacctcttgacagatttcttccactaagggtaaaaatcggcgggttctgatgtgacaagccatgggaaataggaaaagaaaagcgtcagttaaaaaaataataataataaaaggcaatcccagaatgggatcctttggaagaaagtgggctcattcttccaccagggctcctggaaatcccagaagctaaatcaggtaaaatgtcccggtaacctctgggaggcgggacatgactgctaaaccaaggttgcaggcccgtcaggggtgtgacctagtggccaagcgggtagtgacaaacttcgggtacccccaaggagggaaccccgcttgagtcaccacagcccagtatgagtgggtgagggcaagtctggtccagtcaccctggggaccacagcccacgccgggctcccggggccgggcagaagcggcgggggtggggctggcccggctcacctttgaagaagcgcagtgccaggccgtacaactcctccaggccgaaaccccagcgctgctccagccgccgcgcctcctccgccgcgcccccagccgccgcctccccgggctcgggctgctcccctgaggcgcccgggccgcgaccggatccaggtggcgagggcggtggcagcggtggcggcagcagcggggcgccctccgccccaggccgctcctccgggtccgggctgagcgtgaggccgtcgacggacacctcgagtcgctctgcgttcagcaccgccgccatctccggctgctgcacctcctcagcggggacagacggcagccacgtatcgacttcctgctgacctctgacctccgcttaccgacaccggaacttccgctgctgaggaggctggagggctccgggagaggggctgaggcctggcgccccaccccctccggaatcgtcagttgccctggctcag

SEQ ID NO: 13367 - DNA, 1011 bp, Homo sapiens
gattagacttagccaggcaagcagtggtttagaatagagtttcaggtaaaaactaggtaagacttagtaatacagggtggagaatttgtttttgttattgttttttactaacagctttgttgccataggatttatatgacatgaaattcactcttttaaagtataaattcagtgtgttttttttcaatgtattcactgcattgtgcaaccattaccactatctagttttagaacattttcagtacccagggaatttgtgtttgaagttaagttataacattgttttaactggataacttcatggagctttaaaataacaccagctaacccattagttaattataaaaaggcagagatggaatatatcattggtagaataagtgtttggtaagtttttatttagtaaaatttagtagaagaaatgatgtccactttaaaattgtggagtttttaatacttgggacaaactgaaattgtttctagaaagtctttaaaaaaaaaaccaacctttctattgtatacactggatttgagcttagttgaagagaatgggtgtctctttactagtgtgtttactgtttctaattttttttcccttagagttgggagaaggtaatttttcttgattctcttatactgaatctttttctttaaaaaaatgaaatcaaaatctttgaactttttttgaaaattaatttttgtagctataacagtagaaagctttagtacttttgccttttttttttttttcctatttttaaggcacttgagcttatggttaagtactgtttaggaaataatctatttcttgatgaatttttaatttcaggaattctgatgtgaaactaacagtctgtgagccctggaacctccactcagagaagatgaaggatatcgacataggaaaagagtatatcatccccagtcctgggtatagaagtgtgagggagagaaccagcacttctgggacgcacagagaccgtgaagattccaagttcaggagaactcgac

SEQ ID NO: 13368 - DNA, 1011 bp, Homo sapiens
ccaccacaccttaaaccactagctagtgtttgcagtttatggcttcttaccattcatcggtttcctccctcaaagtcaatacatcttgatcctaagcaagtggaacttaccccacagaaaccagtcagcacctttttccagggcaccaccagtttcccccacagcaggctttcgcgaatgagagagattcctatgatctatcatctagtacaaatttatatctcctcggagaaaaatagaacctctgctacccattccaagacctcagcaccaaaagtattaattcaagataaaaaatgaattcctggcactaaaagctcaggaaaaaggaatcctttaaacccttctccaacgagagttcttcaagcctgttaccctcacatagtgaccaaaatccaccatcccatcccgcccccttcctgacagaatccagggtctagtccactctctcgaaagagaggtgggtccctactttcagggaccgggatgccttccgcccacccgtgtcacttcccttcccacctcgcctgtgccctcctgcagcacaggcccggcctggtccctcgacgctaactccttccacataccgctactcaccgcttctttgggatggtgcccgactcctgcgcggcgggagtggccgtgggcgctgccgtggccgccgacgcggctctccgcgctttgcactcattggtactcagagcctcccggggccggcccagcagatggccagagagaacccgcagcctccgcccggcgcggtccgggtccgggtcccggtcccggtccgctgcagacccgtagctcgcgcccgcgcccaagccagtcccacccgctgcagccgccgcctccgccatggctaccgccttgtgctgccgcccggaaccgctgggcgcgggtgaaaggtcactcagagcggcgcccggcgcgaccattcgctgcggcgcatcccggcagccaccgcggcgacttggcggcgggtgccatgcgtctggagcttcacattctctg

SEQ ID NO: 13369 - DNA, 1011 bp, Homo sapiens
acatgtattaactgggcagcgatgcggaaacacctggctgaattaagtgtaaataaagcacattttaacctttccttgctcgtgaaccgctccccggaggccgggctcgccccacacgagggccttgggagacggcaacggggcgctttcccctccctctcgaaagggccccgggcccggcctccctccctcccgcggcagccgacacgctgcgccacgtggccccggccccgggcggagaaacctccccgccaccccgactcagcccgtccgctcacccctcgatgtagctcttgtccgccaggtaatcgttgagcacctggaggccggcagggcttttcaggtctccgaaacccatggtgtcggctgtatccgagagctggggagcagcagaaagagagcgcgcaaattgtgggcgccccacgctgaagagaggaaaaaggacccgaagagaccggaaaattccttatatagagacggaggcgtttccctccaccgcgccggaccgaaggttaaaggtcaaagtacttttgcattcccacttctccacgtacgaattgggggccctgaattaaatggcccacaaattgtccatggacctttcgttgcgtttggaagtaaattaataaaataggcatgtcttaagttcgtacctccacggctcccgaagatgacgggaaccagccctagaagcgccggagatgaccgaagacgcccggcctcgaggctggggccacttccggcggaactgcgggtccaagttgtccttcccgcctccgggctgggccgacctcagctccgccctctggtcggctgacggaaattgccgacaaacttgtcgaatgcaaggattctagtccctccgggctttccgttctccaggcccggctgacagagttagccgaggccgccatattgaataagcgacccggcctcctagggggtcgtcgtggtccagacagtttagcagaacagcctccgcggctccggggagaaggtgaggtcttgtat

SEQ ID NO: 13370 - DNA, 1011 bp, Homo sapiens
gcttatggctgacaggtcagagtcataagggacgcagggtagtggagtatctgcccggatttcctaaagccgcaacatcccaccaaaatagtcaaagccactgagggtttgggaaaaatggacagatagatcctcttctccccctcaggctggaagcccttgaatctcatcctaccgacgaactagagaggacaacagagtgagtgacccctggttcttaatctcacagtcccctctgcccaggctgcagctttacctctcacccttggctgattcccttctcccagggtagccatctctgtactgtcaacctggctggcctctcaccctgaggattttggctctgaggccaagggtcagcttgaccggcttgagagcttcttacttcagacagggtatgcagcagggaagggtgttggggggggcagcgctgacctcatccgcaatctccggtcccgggtggacccccaggcccccgaccttcctaagcccctggccctccccggcgatccccctgctgaccccacggatgtcctggtgttcctcgctgaccacttggccgaacagctgaccctgctagatgcggtgagaccctgacctctggcccctatgccccctgaccccttactaacctctccttgactccagatcctttccttgcttccaccccttcctgatccagctcctagcctcctccacctaccattttgattctccccttttccctttggtcgttacccttcaaaccctgtgcccctctggttccttggccacctgagatcctcagatccctgatattggaaggctgacctcacttgactatgaactttaacctctgacctctaccctgcaggaactttttctcaatttgatcccctctcagtgcctgggaggcctgtggggtcacagagaccggccaggacattctcacctctgcccatctgtccgagctactgtcacacagtttaacaaggtggcaggggcagtggttagttctgtcctgggggctac

SEQ ID NO: 13371 - DNA, 1010 bp, Homo sapiens
aatagggtcatttccgttaccgtgttttgacatttcttcccgttttaagtttatgcaaacaaaaacgcgcagggccgggcgcggtggctcatgcctgtaatcccggcactttgggaggcggaggcgggtggatcacctgaggtcaggagttcgagaccagcctagccaacatggagaaaccccatctctaccaaaagtacaaaaattagccgggtgttgtggcaggcgcttgtagtcccagctactcgagaggctgaggcaagagaatcgcttgaacccgggaggcagaggttgcagtgagctgagatcccgccattgcactccagcctgggcgacagagcgagactccgtctcaaaaaaaaaccaaaaccaaaaccaaaaccaaaacaaaacaaaaaactggcgcaggccccgagtctcttcttctgaggggcctggcctgggccctcctcctgtgcctgtccccgcgcaccccccgcccgtccccccttccccacccggccccaccgcgtgctgggcccgccgcctggtttctaacctcgcgcctcctcgcgactccacccctgccgccgctaagcacctcctttctttctctgctcttcttcaccaaggcccggcccctccctcaccctcacccacacctgaaccccagggaggccctaagagcagggcgcccgcacaaggccgctcctccacccgatgccccttctcagccacactcaccagaaactgcctctggccctgggctccatggcaaccagcatctaaccaggcctaatgccttcccagaagttcctgagggcaaagggcaggagcagagagcaggaccccagcaaggggaggaccaatgggggcagggggcagggggcagagggcagcgcctggactccacgtgccggccacagaaccaggcagcctgttgctaggtaaccacatctcccataactgccccagcacatcgtcctgagccgcccaacctgtctccagccaccttctgtggagtctcaaac

SEQ ID NO: 13372 - DNA, 1009 bp, Homo sapiens
tctctgagggccaagaataaatgtatgctttgtgtatcaaactgtacacttgacctctatactttcaggaatacagtgctctgtccttaaatgttcatttgtaaatacagaaccattttcttgttaatatcacaaaatgaaacttaccaggaagatgaatgacaaccccagaacacagtgttttgtagaaaataccataggctgaaaagatcacaggaataccgagtgctaggttggaatctttcatgacaccaaatgttcattcattctctgccagactttacaactgtcctcggtgtgtttttaggttgtgtaactttacacaaagtggaagcaataatcagggcaagacttaagagaaagtggatccaatgcaagaggagtaaagaaaaaaatccctcaagtatgtgtagcagattgttttaattatctacagaatcttgtgccctaagaaattaatagctcaagtttccagcaagagtggtggatgagatggagagcatttgtgtgagagagaaccaaggatattactaaaaatgaaagggaagctgggtttctcctgggcaaacagccctcagtggctctatttgttctaactactatgcctgccttcatgtactttggtcatttagtggcctgccagaggacagttataaaatctgtggtcattctgcaggcagcatatagttttcatccagagtttggatctaaccagcaaaactctgtcttacacaggatgacttggaattagagtccttatagcagaaagagcagcagggctgtccttgggtatccgttgctcagccaagtcatcaaataaaaaggatgattgcacaagtggactatgtaccaatctgtgggtttctgcatggccaagagccagaccctccctctgggctctgctggcccaacccaccaagggatgctttatttaaacagttccaagtaggggagaccagctgcccctgaaccccagaacaaccagctggatcagttctcacaggagcta

SEQ ID NO: 13373 - DNA, 1009 bp, Homo sapiens
ccaccaaatctccgttttaagtgtaagttttctaagttttgtacacttgtcattccagagggtccagatatttcatagatgaagcccaggtgggctttgctttgcactgaaactagcaagaaaggacacaaaagactgcagagaatgttggggcagattgctggctgcgtatgccaggtcccttgaggagcaagaacatccagtgccaaataggacactagtttggtctttctccaaaccataaactcttggaaccaagagctggtctttggtgtgttgcaggagagtcctcatcccagcgtagacatcccagctggagctcccagtcagagcctaggctgggccagtagaccatgctgtggcctttcttgcttgccccaagctctgcaaagcatcaggcagggccaggcctgcaccatgaccgccaggtgcttctatcctggtggccgacccctgatagcatgcagaacagaatgagagcggcttgcttaagggccagagtcttacttgttccctggagtgagtagaaaagtaggaaatctcgtcagaacatgagacctttttgcgttcttcctttccattcttctttacttcattccctctttcttcttttttttctgtccttctttccttcttttctcctttcgttcacaaaccacacttggagagcaagggtagaggagcagaacagtttgttctctattgcttctagaagttcagaaagcagtagttgcagatgagccagaactcaggcagagaagggttctgtctcttcatactcagtctcctgggcccgtggaaatggtgtgtttcagagcctggtctgtggtaccgctggagtttttcccatgggacttttcacattcaggaaaagtacagaactgttcacatttttttccctgtgctgaattgtttttgcataaagttcccttcttaactccaggtccctcctgtaacgtgaaataaaaagaaagaaatttgccctgccatgatttgcacctgatattca

SEQ ID NO: 13374 - DNA, 1009 bp, Homo sapiens
ctaagtgaatgggagtgactggcatccgctcagacaagtactagggcaaagggataagaactggcagatggcatctcaaaaatgaaattctaacagtggtgtcagtaccttgggcatgggcaaaaatagtaccaacaggaaaggaaagactatatgaaccccaaaagcaagcacatcgcccaaaattgctgtcaataaccaccaacgatcatcaccaatcacctgatcccgtttagattgcacctgggaaccaggcagtcccacctcaagaccaaagcaactgtcacaagtagcaaatatcactcaccaggcaagggagccacaaagacccccggctggcccccacgctcttggtaacggcgcctacttttgggcccgacctgcaggcttgcagccgcagcgatctgacagctagcaccgcccccggctagagcgggtttgtgacctttgacccctgacccctgacctccacggtgcaggaacatcccgccctgtggtttcccatggagaagcttgaaagcccccttacctgtcacagcttcatctcatgccgcgatgtagcctatcagaccgccggtgggcgccccagccaaggaggacaaggatagggcggaactacggaggatgcggggtgcgtagatcctgctgggataatccgtggggcggcaagcgctatacagccgccgtctccccagtgatactgcaaggtgccggtgccgccgccgccgccactgcagtaaatcagctgacaccagccccaactgccgtgactttcgctgcaactgtcgcaaaaatgagggggcgggaaagactcaccatttccctacttgcaaggcctaagccggcgccgagagagccagccgcgttacgatggagaccgaaagtggagaaaaggccagctgtgggcaaggagtgcacggccgccatcttggttgtgggaagtctcgtctaggctgtcctctctccagttgggaggaccaagatggagcgaaggatgaagtagcaagtg

SEQ ID NO: 13375 - DNA, 1005 bp, Homo sapiens
actatgacagcagcaacaacgtcatcctgcgcaagcaccgcaacatggtggtcaaggcctgcggctgccactgagtcagcccgcccagccctactgcagccacccttctcatctggatcgggccctgcagaggcagaaaacccttaaatgctgtcacagctcaagcaggagtgtcaggggccctcactctcggtgcctacttcctgtcaggcttctggtcctttctcggtacctctgtgcccctcccctggggtttgtggctgtcactctgcccgacactttggtggcctaaggcacacagcagcctcagagcctgtgctgactgcactgtctggagtcagcacagaagtcctatcttaggacctgtcagactgtggctggccccggatggtctgaggttggctgacccgagcttttctccattcaccagagggtttaggtgtgaggagaagggctctgcctcttcccaggtacaacactggccatttctgggcaaaattggacacgcttatgttctcagcacagtgtgttctgggattcttctcatttggtccagggtgcagttagcatattagaaaaagaataagctggacatccccacgaagccactggggattttttttttttttttccagatagagtctcactctgtcacccaggctggagtgcagtggtgcaatcctggctcactgcaacctctgcctcccaggttcaagcaattctcgtgcctcagcctcctgagtagctgggattacaggggcccaccaccacgcccagctcattcttgtatttttagtagagacggggtttcaccatatcggccaggctggtcttgaactcctgacctcaggtgatccacccgcccggcctcccaaagtgttgggatgacaggcatgagccaccgtgcctggccactggggatattttatgtcatgtgtattcccttgccctgggcctgccccttctcctgcctgggaaagaggtatgactcccacaggagcaaag

SEQ ID NO: 13376 - DNA, 1005 bp, Homo sapiens
ctagtgggtttccctgaggatctgggttggaaaccagcggacaacccttgggacacttgagatttttccaccatttgggggttgttattactatttctccagacctagccaatccctctgccaaccgctaactccaggtactcttctccaggtgtggggaaagttcccctgaaatatggctctggtcttcctccccttcccaatcagagatgggcagtggaggttctatggcacccatcctggcctcactctgaggttccaatgaggattctgggcatcaagagacagctctgggcaaaagcaaaatcaagtcagcccctggacccagtgctgggctgctgggctttctgggagaacccgctgggcttgctacacactcctcctcccagaaactccacacccacagccctgggtcttcctagccccgagactttcaagtccatatgcctggaatcccccttcctgagacccttaaccctgcatcctccacaacagaagacccctaaatgcacagccacactttgtcttaccctaataaaacccagacctttggattcctctcccctggaacccccagatccacaactttggggtgcattctcactctcagaccccaaatccaaagcccaagtgctcccctatgcaaatattccaaactcctcagttctacagcttatctgttgccccctcctaaatccacagccctgcggcacccctcctgaagtaccacagatttagtctggaggccccctctctgttcagctgccctggggtccccttatcctcccttgctggctgtgtcccaagctaggcaggattcatggtggggcatgtagttgggaggtgaaatgaggtaattatgtaatcagccaaagtccatccctctttttcaggcagtataaaggcaaaccaccccagccgtcaccatctatcatcccactaccaccatgctggcctcagggatgcttctggtggccttgctggtctgcctgactgtaatggtct

SEQ ID NO: 13377 - DNA, 1005 bp, Homo sapiens
cagagcaatgaaacaaagctccttcccaaccttcagggagcgactgaagcggctccagatcctctccgctcacgcttactttgagcacattgagttgactccaatcgtctccttccctcttgaaagacatcacgactgtgagtcccagaagtgataaattctctgttccggtttcgccactcctccaggccaccgtagcaagagcgggacagcgccttctcttttttccttctcttcctgtcggcctccgtacttccggggacgcacttccacgcatgcattgcgcgatccggaaatccactctctggtgctcggagggaactgcatttcctatggtgccctgcgactccgcagacgcggagccttttgggaaatgaagtcttttctcaaagaccttgccgctcaactggatccaggcccttgcatcttggcggatctgaggcgtttggagggacaacaacctagatgtggagccgaaatttgagggtgtgacctatcttatgcggagcggacctttgaggatctctgagtggaaggtgtactacaaattcttgcaatcctcacgctcttcgtctgcggcgacagttcacctggggtgggcctgatttgttcctgactctagcaaacaaaccccgggaccggggagagctgggatgttggagcgccctgaggccaggctacttgggggcaaactgaggaaagagtgttgaggattatttctagagttcaaaggtcagaggtcaatgtagcgaggagttgtgggggagtccaaagtcggaggggtgcttaggggagaattagggagggactgaatactcaagggacagatttgtggataagtagcttggagggaggagaaaccgggagggggcagatggcgtagtgctggggaggcggggacacaggggaagagagagggggaaaggaatcccctgaatattcattcccagacttcaggcctgtcagtcgcagtctcggtcgtacctcccctagttgcaaccttag

SEQ ID NO: 13378 - DNA, 1005 bp, Homo sapiens
cttgaggctgccaagaaaatctatcagaacattcaggatggaagcttggatctgaatgctgctgagtctggtgtacaacacaaaccttcagccccgcagggaggccggctaaccagtgaaccccaaccccagagagaaggctgtggctgctagtgacctctttgctgtggcccctcatttgacctttcacctctgtctgttggaagcagtactttttactgcctcattgtcttctgtacatcttactgggtttaattaaaaaaaaagaaaaaactctgttgtaaaaacagtttaacacaatactaaactgctaaacaactagatgtaatcaggttatcaaaggcaagtagagtaataaatctctcctgcatggtaaatctagactttttttcccccttgtcctcgtgataagtatgtcaccaatatatgatttaaaccgagcactgatgctggacttcatgatttttaccctccctttggcaaggctttgtctcactgtacggtttaatttggtgatatcttaagcctttcttcccatccttaactgttcaagtatgtctgttgtaaccaataagtttattgctgtgaaattacttctgatggtagagaaggggttctataactgcttttgttttgttttggataaatttcctgttgtgtgggtggcatttttcttaacgagatttgcttctgtcttagcctcacacagggaaaatatccatttatcttctctctcgtgcttaattaatagctttatctttttttataccattttatccttttctctttaacagaaagtaaatatgtataaaatttgaaggaatcgaactaacaatacattctgtgtatattattttaatgaagaaaataaattgattactggcattggaacagtataaaataccagtttgtacagtatgacctatatgtgaccatgttactcccttccatttcacacaaagaaatagacacaactgcagttcacaagtagtactggctccaccc

SEQ ID NO: 13379 - DNA, 1004 bp, Homo sapiens
ggacgggggagatatagtcacttccctccaggagcgaggcgagaggatgatgcggggtgggctactggcacgtgagagccagtggcaccgagagggcgccccggcggcgaggaaggaggcgcgcgtgggaggaccaggctaactccgtcacggacgctaccaactcgcgttcggaggagggggggcgcgtgtcatcactaccttgcgctcccgggagaacctaccactcacctggagggggcggcggagcggagggcggggcctactacctaggggagagggggcgtggacacgctgaggctatactacaaagccccgggcttgaccttagtggaaagccgagactgcgtccaggttgctggactacaccgggggcacggtcagaggtctttaggggagggcggcggtctgagagtcctgggtgccgacctgttgggacccaaattccttgtgggaacgatgataaggagcaggtttacagatcataagtgcaaaagcgggcgagaagggaaacccaagcgggacaaggacttttggggggaggtcaaagggcacgaagttgtgcctgcagctgttaccatagtaaccgaggaccggatgtggcgatcttacggtgcgacagtcctcttctcaggccctctggcccgagagcctgttgactctgtgacacactctgaggagctggttgtggtgttttccagcgagggaagaaaagagtaattttttcaaagcatttatagaaacgcagcaaagggaaggtgtgaggttgccgccatgcctggcagagacggagggaggcagttggctccggaatgcggccgccgcagatgttctccgcaaccttccggaagtggaatggcgggagcctcagcattgctgcccaccgaccccccggaagcggaaacagaatccccgcgtgccccttcctcactaccctccaaatcccgctgcagccattgccgcagacacgatgccgaaacgaaagaagcagaatcatcaccagc

SEQ ID NO: 13380 - DNA, 1003 bp, Homo sapiens
agccgagataataacagccacaaatgtcagggggaaactgaagggaaaatggcttgatgaactagaagtctggacacctgagtcccagtccgtggaccctcaggcaagtaccttaaaccttcccgggcctcagtttccttcttcgagaaatggggctaactttgtctcccatctcagaagctcgatcaggcctggaaagcaaggctcaatgaagaggcttagaggggcctaggttgtatgtgggcgagaggacaatccggggaccgtccagggggtggggatttggtgtttacctttgcggagctcgcggtgccacacggagacgatgggtcccgcgtgcttgcggtggtggatgagccaaagggacagggtctgcacgctctgctgagagttgctcagctccgagagcttcttctccagcgccgactcagagaaggaggacatggtggcggcagtgaggcccggcagggagcggcctgggccgcccagtgcggcgggaagagcgacggcacgaggccggggcctcacctgacaggctgcgggactttttaccgactgacagactgccaggggtgcgagaagggggaggggatgggtctccgcagtaacagccgcccgcgccgccgccacaagatggccacccgacctctcaccctgccgcgagagcgaggtcaaagggcaagggccggagcagaggggcaccgagaggcgtcggagctctagaaaaccgtccctttggaggcggcggccgctctgaacctcgcgcagagcacttcgaaggagacagagcgaggcaaggagagtagttccccgggcccccggaaagagctttgaccgctcgagcctgcacaccggcgcagtggatctcgccggaaccctttttcccgctccctcggaacctttctggcgcgatacggcgcgctacttagcgcgtcacttccggcgaggcagaggaggcgggagagtgagagaaaggctggaagacgaggtaagggaagagtgg

SEQ ID NO: 13381 - DNA, 1001 bp, Homo sapiens
tttccatgatgactttggcttttgccagaggtaggctactgcgggggcataagccatatcatgccatgagccactatcctgctcatgttccagaatgaggagacatctgggtgctggcccagctgctggccaatgagaggcttgccaagcatggtactctccaaggtgacctctgccctctcaggtgacacagtcctcccatgtgacattagctcacagtggacagctacccacgaggcatcacacagccaggacaggggacggccacactggctgggtaattgtgacttacagacaaggcaccttctgtcccctgctcattttgagcctccagggtatcccctgctgagagtcccacaggagcctgtgactggccagggacccgacaccccaagtcagatgcctcttgtccccatcagcaaatgggatcacagctgccctgtgaccaccttctgcatcctggtgtcacaaccttctggccctgaccttatgcaggggactcttacaaccctgctggtccttccacctcccagctggccaccctcccaaccaccctccctgcccatggctagaccaagcccagatgacagcttctctctgtcctgtgtcccctgccctgaccccacatccaggagaaggccacacaccctccagcacccctggtcaccccaccagctcccacctgtcctcactgcttcaaaggcaggcctgcccttctggagccatggccctggaagccactaagcagtgcctccagccaggccccaggggcattcccacccctcctctcctggccgagaccacatgatggggtcactggatgggacagtgaaaggccttggggtctggaagcaaccaccactgcccaactgccactgcccaaccgctgctgcccaactgccactgcccaactgccactgcccagcctgatggctccacatctcaggagtaggctctgattccttggggccccaggagcctctcaggagtctacatcccaa

SEQ ID NO: 13382 - DNA, 1001 bp, Homo sapiens
tgtcacagagtcaacaggctctcgggccagagggcctgagaagaggactgtcgcaccgtaagatcgccacatccggtcctcggttactatggtaacagctgcaggcacaacttcgtgccctttgacctccccccaaaagtccttgtcccgcttgggtttcccttctcgcccgcttttgcacttatgatctgtaaacctgctccttatcatcgttcccacaaggaatttgggtcccaacaggtcggcacccaggactctcagaccgccgccctcccctaaagacctctgaccgtgcccccggtgtagtccagcaacctggacgcagtctcggctttccactaaggtcaagcccggggctttgtagtatagcctcagcgtgtccacgccccctctcccctaggtagtaggccccgccctccgctccgccgccccctccaggtgagtggtaggttctcccgggagcgcaaggtagtgatgacacgcgccccccctcctccgaacgcgagttggtagcgtccgtgacggagttagcctggtcctcccacgcgcgcctccttcctcgccgccggggcgccctctcggtgccactggctctcacgtgccagtagcccaccccgcatcatcctctcgcctcgctcctggagggaagtgactatatctcccccgtccgccttccatcgccgccgcggcggtaattctgtcgggcccgcccgctgacgtcacctgctagccccgcctcctctagggtcccgggcccctgcggcgggggctgccccggggggcagtcagttgaggcggcgggagctcggcggagggcgggccaggtgactggtccgggccatgccgaggaagaagccattcagcgtgaagcagaagaagaagcagttgcaggacaaacgggagcggaagagaggtcagtgcgggagcgggaggagggggcggggctcgggcttccgcacatctggaaggaggggtgtgcccgctgcacctctggggatcgt

SEQ ID NO: 13383 - DNA, 998 bp, Homo sapiens
ccagctgagactccttctcaaacaaacaaacaacaacaacaacaacaaaaacatttagaataaaaaccaaatcacttccatcgcccaaaagtcctttcatggtacagctcctgcccagctttctgatcttgtctttccctggctgaggaattctatggctgtgaaatgggtaggacacagtgaacctcagctatgtgccaggtcaggagcctcccacacatcacctgatacagtccttgctacaacccagcaaggtaagtgttattaactctgaatttgttgtgagcattaagtggaagtggatgatgctagtgcataagcagtgatcagcaaatgctggagtccctgcctttccttttgttccagtggtggaggtgggcaggacctgtagcctagaaaagtctacactgcttagggatagaactggaaccagagccggctgtcccttgtcattcatgctcccttatccactagcctgatgacctgtctatagggggagctgagaagcgcgagttctcgctctctggagggacatgtgggttgctgaaggagttaagatgtctcttaccaaaccctggccctccccatccctgcatctgcctttgtggctttaatgagaaatccaggcgcttcataagagactgtacaaataacttctagggcgccactaactcattcagcagaaagggacccagggctgccaatgtttcagggaagataagtgagtggaaaaaaggtggtttttatagcgtcaggcggaccgaaggatttgcgtggttgagcgtgaactccgcccctgcagcagagctgaaaaaaaccaggatccgggttcctcagccccttttcacaatatttgattaggaatttggggcgggaccctggtctggcacaggcacgcacactctcagtagactctttcactcctctctctcttcctctctcacacgttctccaacccaaggaggccagacagagggacgtggtcactctctgaaaag

SEQ ID NO: 13384 - DNA, 998 bp, Homo sapiens
tttccagcacggttaaaacaactaaattcaaatcgagtgaacgtgatcgtcttgctcgctggcagcgaaggctgctgctgctctgctgagaggtaactctggagacagtggaaaggggctgggagaggaacctcgagggtcgggtgaagcccacccagagtcctccccgcgcgcggacgctgttgggcggcgccagggtctgggctgcagctcacctggagctgcaggtggagagcgtgaggggacgacactttgctcgcggaaaaaccgacttcttccgcgtcagcacacttttcacatctctccagatatcctggggtcggtcagaaggagagcagggtggacgtaagcaagtttggggcggccgagcgatgggggtgggggcagcgtgcggaggccgcctgatgtagccaccgcccggcaccccaagctcccgccgcggctgcggctttaaggaagctgccgagtccaggctgtgtcgcagcaactttgtatcagtcatgtcgcccgcctggtgactgacagcctggattgtccaataagaagcccgcctgacccgtgcggcgtggagccttgcttctcttcgggccaataggaagggttcaggggggcgggatagcaacctgaactttatctggacatgtgacccgcttttaaaagggccagccctccagctggcccactccccctccgggctttcgcccgccctctctccctcccttttttgcccgccctggccctgcccctgcccctgccccctcctctcagcccctccgcgcccggggtgtcattgggcccgggagacgggagccaacttcaggctgctcagaggaagcccgtgcagtcagtcacctgggtgcaagagcgttgctgcctcgggctctcccgctgcagggagagcggcactcgctggcctggatgtggttggatttaggggggctccgcagcaggggtttcgtggcggtggcaagcgctgcaacaggtagacggcgagagac

SEQ ID NO: 13385 - DNA, 998 bp, Homo sapiens
gggcatctacaaccatcaaaaagtgaaagtgctagttgagagttccatttctgacccggtgccggggaggaggaatgatttgcaatagtcagacccgctcagctgttcaacacgtgtgtgtttgttttacacacagagtagtttctgctgcagcgcgcgtgtgcatgatggatgtgcacttcgctgggttataacgtgtccagttaagaaacccacgccgtacgtgtaaagaaatcaaaccttatccccggaaccatctgcatccctgtgtgaaacacgcacccagtaaatgatgcggggaggggggattagcctgggcgcagaggaccggagcaacgtaaacagctttagaacctatgcaagaggaaagtgcagctgcacctcagggcgtcttcgggctggtgccagacgccttctgcaccggctgccaggtcactggagctggtcagaagctggctggcggagccttccctttcggaagagctgtcctctcccttacccccctcgccctggctccgtgcctcggggcagcctcggaggcgcgccagcagcactcctccaactctactccacccgagcctgacagctgggcggtcccgcctgacccgtgggcaggccgctgcaccctcccgcagacgcacgccctggcgagcggttccgctgcaaaaagagaagcccccaggccggggccggccgtgcggcggagtttccattgtgcggccgtgcgactggccgaggaacgcgcgcgcgcgcgcgcgcacacgaacacacacaccctccctcgcacacgcggaaccggctgggccaggggagggaggaggagggtgacgtagcgtcccatggcgtcacattgacgtctcgcattccaggcactctatggagaggccgctagggctcctgtggcataaatgacgtgccgagagagcgagcgaacgcgcagccgggagagcggagtctcctgcctcccgccccccacccctccagctcctgctcctcct

SEQ ID NO: 13386 - DNA, 998 bp, Homo sapiens
caggacagaggtcagaaggaaaaacactgcagtgttcaaagctggagctagaaatgccagccgtcaaagaacacagaactcagtggacggtgatgatgtatagggcgtgcactggccaaccccatccgagaggtcacatctaacctttatcctcagcaaagccactgaaggtcgctcaatatgtgtgacccgcaactctgaggccctggtgagaagctgtccaggaaaacgctggtgcgtgtgctagagggttccttttcactaagggagaattgtcttccagctccttgcagactgacatcgcaaagtactttgaacgttgaaaagaacaaaaaaagcaaacagtcacacacacacaaaaagtaggcgggaggagggggaaagaaaaagggacagagagagagagaggtatcagcaggggtggttagtaaaaaggggcccggagacagaaaaccttttgttcccggagttcgtttcatgtagagattgtgaggtgaatggctttgaaacgaaatgggtttatgaaggagttgctaggtcacaggaagcgcgactgtcagactgcttttgtgaattcagtttctttaaaatttgggttaatcttaaaaagaatgtatctccttttcctgttctttctctttctgtcttcttttttggcgggggcgggaggacagagtaaggttcaggacggttccccactttctgttttattttccaccgtctgataaagcaaaaagaagcgatcacattacaagttctttgtcagtttttcagaattaggggtgggcagggcctgagcattaccttgtcccactagccaatggcggggcggcatgcaaatgaggtccgcgatcagcctgcctcagtcacaacagtgagctcagagacttgagggaggcgctgcgactgacaagcggctctgcccgggaccttctcgctttcatctagcgctgcactcaatggaggggcgggcaccgcagtgcttaatgctgtcttaa

SEQ ID NO: 13387 - DNA, 996 bp, Homo sapiens
tttccccaccctttctttacattgcctggtaactaaattttccactttctcatttttaaaatacttaacactacatctttcctctaagaagcccaaagtactttgtgattggtaatttattaattcttacaaatctctatgagcaaagtagtatcaggcattttttaaaaccatttcatagatgtggatctaagaaaaaaataaaatatcagttgcagttctagggacaagaccaaaaggacatagactcttaactcaaggctttcttctacatggttgaggtcttatttttattagcagcaattgtttagtgaatcagattccctgttttttcactgtggctttttgtttttttctctagattttccatgatgatgatgccatccctggatgggaagggaaaattgtagcttgggtggaagaagaccatggagagaattaatgccaagtatcagattgagggcttatggaacctggtcactccctggctgcttcactcaggaaagggaactaaaaccagaatacactaagaagtttctagtttgtgtgccaaaacagaagcttctccaagcatgatggccacaggtcagtcctctttctgtgcctggcatatctggtacttaaaattctgtccaaatgtagaccatgggttcatctggagttccttgtccgtgggaacacagtgttctattctactctgaggacaacaaaccgaaggccttaaacgatggggatggatgatcccgcctctgtaggggcatggctgctattatctggaaattaggaattggatgcatcattcctgtgtgttacagtattattttaattggcctcaatggttgcagcaatcagagtcccagcgtttgtactcacagacaaggcaaaggtaccagcttttctgtttctttgaacctactgcaaaccaagaataactcatgaggtggtaccaaagatgaaagcccagacttcagtaatcttttgaaccagacgtggatg

SEQ ID NO: 13388 - DNA, 996 bp, Homo sapiens
tgccacacacctactgtgtttctggcccagatggaagaaactgaagttatgctttacatgctgtgtcattttaacattctcaaaatctcactaaaaatgggatccgttagatcaattcaagaatagataaaaccaaaacagaacaaaaataccagcagaaccaaaggtaactcaaagatgctgcaccagtgtagttagcacactcaattcagttcaattcaatttgtaaaaataaagttagaagggttcttaaataactttgaccttaaataacgacattcagtctttaatccagtttgagtgtttgtcgaggaatcctgccataaaaatgtttgactctctgtaattggtggttgggaagattagaaagacagtgaatctttggtacctattttctgaattgggtgaatgaatgaaagaataactgaaaagttaaatattgttaataaagccagatttcttcacaaagggtccagacacatgacaacccatgatgtggaaacgatctaataatagcaaacgatgacaagcatttaatgagttcttattatgtcctaagcatcattctaagttactccacataagctaagttgtttcattctcacataataactctatgggataatagtactattatcccaaccacattttattattgaagaaactgacacacagaaggagaaaggtcacaaagttaagtgtggcaatcagaatggacgtgcattgtcgcccagccttactattatcctctatatcctctcattatttcagtcaattccttcaataattatgtaaagtataatttaatcaaagagaaaactaagctcagagaagtgaccaaggtaggatttgaactcaggactaaagtcttaacatttctcttcagtaaggttatcttcacactcaaagccattatcccttatggaacttttggtagtcaatctaaaattgttcctttagaactttgtacaagagatcattgtcatcctgggtgtt

SEQ ID NO: 13389 - DNA, 996 bp, Homo sapiens
aatctctccacctctaacccctgccctgtcccaggctccccctcctgcgtctcaatgagccatgtcccacggggttcctgggtgactccccacttcctcctgcaccaccagggggaaggtgtggtgaccacaggacaatcagctgggcagagaagagaggacatcaaagatggtcaggaagaacatgagaaatcctgagcttcagctcagccgccagacccgagggagccatagactgaccaagaactgtccctttgactatgggaatcacagcccccaaagagcaaccagcacaggcctctcctcccaagaggcatgagagattcaccctgcacacctccaggtaggacactttcctctgtgacacccaggtcctcaatgtccatccttggaagctgcagccaagctagacacgattagagaaaggaagggtccttctcaccaggcaacacacagctcacacacagcacaatggggcatcactgtgacagggacctggtgcagctccagcctcctgcactgcaagggagagccagatggggatgaaagagggcaaagggcatgaatgtgcaccgcaaccaagacccatggggacacctggaggctgaggcccaggactctgcttgcccaacctgcagggtatgtgtgtgactgtgggtctgtgtgtgtctcttctgtgtgtgtgtgggggggggggtgtgtgtctgtgtgtgtttgtgtctgcacaaagtgtgtgttgaggtttggtgaaagaatcactgctgaaaaaggcagaggcctccacaattcccagggacctgaaacacagacaaaaggaaaaacagaaggagggacaaggaggcaggatgtagagaggaggggacagagaggtgtcctgggcctaaccccacccatgagcctgagaagtgctcctgccccaggaagaggctcagcgcagaaggaggaaggacagcacagcctacagccgtgctcaggaagtttctggaacctaggctc

SEQ ID NO: 13390 - DNA, 995 bp, Homo sapiens
gttttatgactggctgttggagctcctaaaatggctcaggagccaaccaaccattttactctatgttctgatttgtttattcattcattcattcagtcagtcagtcattaagcatgtattatgtgcctactgcatgcaaagatacatgggggattcaacctttctacttaaccttatctcacctcactccctgcagcgaactctcttcgccgctgcactgagcttctcactgtctccgctctccaaaatgcctaacactctccgtctcagtgccttgactcaaggtatggctgtagccatcactgctgcctctcacccctgaaacaaagcagcatgttagaaggatttgggttcagagtcaggaggtaaggattcaaatcttggctctgtctctcactagctgttaaggtctttagtctacctgagccccagtttcctcatctgccagatgggaatgacattaggatctatcacagaaggttgttgtgagaataaatactatgagatgtgtaagatatctattatggctaagtcagtgcctggcctggagttgaaacttagtaacaaatgtctgttgaatggacctgatgaattctggcctgggaggtgggaaacttgaatcttggtcacaggaatatgtgcttgaataagtcactgcttttctcaaggggctccaatcccttgattaaaatggcaggcttggatcaccagaatgccaagtattgacatccctggcttcccatcctgtgattctgacctggatccagggacacttggcacacagccggcttcatctccatcctccctcagggaagacatcactagtagatcagagtgttctgtctactgagcccttggaatctctccacagggcacctgccagtcatcgccaatcaaacccgagatgacagttgagatcaaacagacttttcattcctggttggtgcctgggagagtgacgaggcctatcagtactggaggacacagtcaaggtg

SEQ ID NO: 13391 - DNA, 995 bp, Homo sapiens
cccgtctaaaatctgagatgcaaaaaagcggcataatcaaacgggctgctggatgtaggaatctggagattagaagagaggtcttggcttgaaatataaatctgggaatcacaagaacataggtctacttaagctatgagattggataaaatcacctagagggtgcagagggaaagggaagggtctgtgccctcagagaccagcgtttggaggtcggtcgggtgggagcggggggtgggggtggggggcgcaagggttgagcaagcccgaaccagccggcccagccggggtcctgagaatcacccttgctcggcgccaagccaccgctttgacctaagagccaccaggttggggggcagggcgtggagaggactcccggccagaggcgggaaaggcagccgggaggagaggaaagaggaggaggaggggaggaatatgcggcggagggaaacggagaagaggtttacggcacggaggggaaaaacgaaggaagaggaggggctcggcaaggagaaggaaggggagaagggggaagcgcaggagaaaagggtagccggggagccgggaagcgggcgggagggaggggagcggcggggcggaggtcgccgcagcggccggccgagggcgggcggagggagggggtgtgtgcgcgggtcacatggtcgcggctgccctccccgtcagccgccctcgccgccgcggtgcgctggctgcaggaagccgccgcgccgccgcttttgttgtcagggacccagcgaggagcgccgctcgccggccgccgccaccctctctcgctgcagcctgctgtgcgctgcacggcctggggcccgggagccccgcccgctctgcccatgagggggccccgcgaccaccgctgcttccagcccggggcggcgcggcgctgaggcggcggcggcggcgctgccccctctgcgggaagcgggcggccccggccgcctccgcgagggcaccatggaggtgaatgcaggtaagaa

SEQ ID NO: 13392 - DNA, 995 bp, Homo sapiens
ttaattcagagagagcacctgccaccccaccagccaggtgactgtaaacagggctgccctcctccctctgctctccttcactccctcttcttggctctaatcagcccccttgtccctccattctctgctgttccagcctaaggaggtgtgtgtgtgtgtgtgtgtgtgttttggggggcggggtgtatctgtgtctttgtaaagccgagagagggaggtctccaggaggaggaaaataggagcaagaaaactaaactctctcctcccccacctggagtggttttccagcctcaggtggctgcagtaattatttactaggtcccatagagaaagaccaggagaggaaggagggagcgttccttgcttccttgaagctcccaagaaccccactggcacccacgctcacctggtctgctgacacttcttcttctacctgggaaacctccccctatgccagcctttctcggtctaccctccattcctaggagatgattaggggcacagaggctcacccctgggactcctcgggaagggctcccctgggcatagtgctccacccattttgcctctgggtgcaaaaaagcaaaacaaaacaaaactgccacggtggcaccagttcagccagcgccagccagcatgaatgtggacggccaatgatcttttaggaattctggcagtggggccactccctcttgagggcccctttcttccatagtctcctcccaggcctgtcccccaaaactcctctgacctctgcccctcatccttgccaggccctcccctgctcacttcacgccacttctcacctcttccaagctctttgggttttccaagtacccccttcagaatccttgcccagccaaaccctctgcttcccctggcctgtggggcccaatctcaccttctcataggggctacgatcggtactgctagggggcacatagcgcccatgggtgtggtaggtggggtactcgctcataggatggtaggtatcc

SEQ ID NO: 13393 - DNA, 995 bp, Homo sapiens
tgcttgcaaccaaaaagtagtgaccactggaagagccagcccctgcgagaggacagaggcatggccgccatcaagaggcaggcaaaccccagagaaggaggccacggacttggcagtggacgaccggtgtgcgatctcagtgccacaggttactggttttgtggcaagatgtgtacctgctgacagcatggcttcctcgtctgcagagtgtgacagtgacattccctgcctcattagacgttaggatacagtgaggcgccgtgctcagccccattctggcacgtagcatcgataaacaccagctcttaccggaccgttcccttatgctgggaggaaagaaacgatttggatttcctctgtctagaagtccagctatctgcatgtgtgttcagaggacgttctcgtatctcaggagtgaaaccaaagcatcctgtacatctttcccccacccccactcatagcctcggattctctgcacagctttagtaaaggagctgatggggaatcggatgcctgaccccgagtcctcactctggggctcgagcttaggataacttcaggttcagctgaggcctctgaactgtgactccgccccgtggccgcatgcgtcggaactcctacctgccctttgcccttctcgaggccggtgcttgactggaggagggctggcagcagaagtgcagctgaccgggttgcgttttcgtacggctgactaaagcggataccggtggcgactcatttctcgttttatttttcaacgatttggcggagaagctcctcttgtgaatggactttggatttcttggagctgcgctgcgggtcccacagtgtggctttcggcccgtgctgtgctggcgcctgcacttcctctggcggggcacggggtggcgctccctggtaaagcagcggccagggggagccgtgagtgaggcgctgcctctcccgctgaagcgggttccaaggccaccgtgagggggaccatccatccaggtaaa

SEQ ID NO: 13394 - DNA, 995 bp, Homo sapiens
agctttctcctctggctgagtttgagaagctgccatgcagcccctagccccttccctcctcctggggcctccagcccctcacactgctgttcccagtgatatttgggatctgactgaagccagaggctctgtaaaatcagaccatagtggaagtcctcagccccctggccccttccgcaatctcctcccccagtctcccaaagagccatttcaacagagaagggaaatgacaaaggggcagctggccagataagctaggatgagagcagagactcagtgtgtgggtgtcccttcctgcttccccttcaggtcttggtttgttctgaagggacgttttatagtcactatccacatgccagtgtgaaatgggcatctatgacgtggtcagggtgtccattcctaatcatggggcagatgccacaagcattcagaaaggagtctgaaagggtggccacagccccacgtggtgtgccctggaggcttaggttggtctgaggttggcacctcaatctacaccagagcccagggagtcccagaggcaagtttcacagaattgtcaaatgatcccatttccttgagtctgtttttttttttgtttttttttgttttttttttggcagagataatcgtgtcttaaaagttgtttttaaatgacaataaaacaagccagaatgtcttttgtgctggagtgtctgctggcatttgccccgtgcatgtatagcttggtcttgatttgattggcacccctacttgtaaccgcagaacatccccctttcccttcctgttctgcccccacttttgtctagagcagaagggacttggctttggccactacccatccttcctgctgccactggaggtgggagccaggcactgatctgtctatgcagaaccatcccccgtaggatgaggcctgtccttactcatttctcaagaaacaagatgcttccaaaaggtctgtcatcctccagttgaagtctgtgtgcctaccaaga

SEQ ID NO: 13395 - DNA, 994 bp, Homo sapiens
gctcagctaggtgtatcagccattgtaaatcctcaacataaattataatttaacctagaatacagagactaggtagcaggaggagaggaaatgtagagatactaatctcttctcccttatcagaaagaaacctagcataagaaatttcacgcttaatgggccaaagagtaaatcagaaaactccatgggtgatggtatgctcatggtggtggtggtggtgatggggaattatttgccctcctgtgacctcccttggattaatttctccccaggacaatgggaaaaatcatttaatccttggagttttttttttttttttttttttttttttttttttttttgcttgagagtgactctgatcctgtttctgatggtcatgttcctcagcatcatactgagtaagtcactggccttgtagcatctggagtgattggagtgatccaagatccctagttcccatgtcacaaatgaggatcccacatatctgggacagagatggaacattatttctgggtgtgtctatctaatctattcatcctatctatctaatttctcatctatatatatatttgcctacccatccatccatcaatccatcttagctgtacgtttatccattccatctatttatcctattatctatgtatctatctatcatctattaatagctatctatccatctgtctaatatatccattatctatatctactttatctatctacctaatgtatccatcctatctactctatctatctgtgcatctacccatccatctggaccctgagctgattcctctgcacccagctggcctgacgccaggtgttgattggctgcccaggctcaggagacacatccaggctgcagggattggttggcccagcccaacccagccagccctcccacagcctttgctatatcaagggccagggtcaaaggcctcccagcagacagagagaggaggttgtctgggacagactgctcctgacagaaggt

SEQ ID NO: 13396 - DNA, 993 bp, Homo sapiens
cagagggttttgcttgtgtgtccttcggggacccgcctgagcctcctgtgggctgggagtgagccagacccccggactggggaagcagggcactgcagggcaaggagggtccctgagccagggtctccctatgcctccttaccccttgaatcaacatccggagaaggcagcctaatgaggaacactgtccgcatagaccttccttgtcctgatgggaggaacagaggtgctcagggccccctgggctgccctaaaaacctccatcttccagggcctctgaagacccttcccctagtgcagaacactgggcggtgtccagagctccccacaacactgtccccttcccacactctcagtggacacactgacctttgacttgctctgcgggagctgggcccccatccctgtgcctctgtctcctccagggcaggaaaggaaacaaactcccagcccatggagaacccgacgtctcaggtcaggccctggctgggactccgccagtcaccagtcccacgagggtctccagtccccctgctcctatagccccacgggaggcaaggcctctgagaagagccaaggggacaataaactcacctgatgccacatggtcttgggttgtgacttgggtaccacatgctcctgttggtcttggagcccctggactgtcccgccatttgggctgtggaatcctgagaagcccccagcccatcatgaaatcagagccttcccccaagatgtggagccatcagctgcaagagctgggcagctgcagaggcccccaaacctgaaggcctcccaccctcccatctggtgaccccaccatgcggcctttgccctggggaggtaggacaagaacatcccctggagcctggctggaggttcccctggaggcctcctgggctagggtgcaaaaagggcaagcctgactttgaggtcacaacagagcggccagaacacggtgggtgctgggcttcctggtcatcttgtggaagt

SEQ ID NO: 13397 - DNA, 993 bp, Homo sapiens
tcattgtcattgtcagcctctgtacaactcccatccctgaggaacaggcaagtgttgtgctcatactgaggccctccagaaatgctctcccttcccccatagcctagaattccactgctgacttttactctgttgggttatggtctcccctgtggccacacagatgtccttgggagggaaagtgccttgggctatgaattccccattgaaaagtaattcattcaactcgaaaattactcagtgagtacttactatgtgctaggcactgtgctgggcttacaaagatgaatggtccctgccagagactatcctcagggagaaacagacgctgacacaagctatcactatacaaagagaaagtgcagaaggaccaagctcaaccagaggggccaagaacagagggagaggcagtcacctcctgggggcccagggagggcacactgatgaggacactttgaattagaccctgaagaatgaatagagaatttttgagtgggcaagaaacaaatacaagagaaaagaaacagagagcttactaggtgaagaactcaaattgaaatcctcccctgtcacaagcaacggcccttgaacacttacagcctagagctagggctgctgaaataaaagaccaccgattgggtgacttaagcaacagaatgtatgatttcacagttccagaagtgagaagtctgagatcaaggtgtctgcagcattggtttcttccaaggtttttctctgtggcttgtaaaagactgtcttctcctctttgtctttacacggtcttcccctatgcctgcctgtgactgaatctcctcttcttttaagtcataatggattggtgacctcatttaaccttaattttctgtaaagaccccatctccaaatatagtcacattctgaggtactggcggttaggacttcgacacagaaattttgggaggacacaattcagcccataacagagcccatgctggaagacagtccctgaaacac

SEQ ID NO: 13398 - DNA, 992 bp, Homo sapiens
ttcggtaatttcccaactagggtgcactccccctgtaaggggctggggaggggacggtgcgaaaccaagttcagcttgtggagcggagccagagctgttggccgagcttgggcctggccaacgcctgccctcgggaaggtcctgtgtagggagactgcctggagggactaagcgagggctctaactgacgtctcaggggcagcctctcagcctgagaccctgctggggaagccgcgtcctgtgcactagctgcgcctagggctgaggtgagggcgcaggctccccagggtgtgtccgaattgcccgcctcagcccgcggcctgtcctgaccgcccagcagcggcagcagcgacaccctagggctccaggaagggcttgggaaggtgtaaaggcggggctaggctcggagggagccggagggaccgggcgcggttggctcccgggagcaactggagagtgaggagatcctcatccggggaagccccgcggccgcgtctctacagcgccccttctcgggctctggccctcccgctggttattctggacctgggggcccccagctgggacccgagtccggtgcggggagcctagtgggcctgggagctgctatttttagcgggcgcggcgggcgcgaggagcctatttatagatcaaacaatccgcgctccctgcgtcaatggaaccccgcgtgcgtcacgcgcgcagacattccaggccccccctcctcgccccgccccctcgggctccccgggccgcacctccccctggccgcctcccgccggaaccgcaccgccccccgcgcccttgtatggccaaagctcgacgggcggcctgcgtcagtggcgcccccgcccctccccgtgcgtcacggagcgcttaagaggagggtcgggctcggccggggagtcccagtggcggaggctacgaaacttgggggagtgcacagaagaacttcgggagcgcacgcgggaccagggaccaggctgagactc

SEQ ID NO: 13399 - DNA, 991 bp, Homo sapiens
ggcagacaccaaagtaacccttatggatgatgagactgaactataacaaaacaccaagttcaaaaaaaagaacacatggtccctgcctccaaatgtttagtgagaaaaatagatttacaaatatctgcattacaagatagtataaatggagtcatagggtagaacatcaatagtgtgctactgaatgacaaaggaaaggagaggttcattcaaggctaagtgtgaagaaaagttgtggggtgggtgtagcaatttaggaagaggatttccttgatggaaaagaggcctgctggaacaagagaatagcacagagataaggaagtctagtgtgtttataggaagcaaagcagtttggagtagctgaaacctggaatttaagacagataaggctgggaggtgggatggggctagattatagagactatgacatgtcatgctaagaaattaaaatatgattgaacattattggtatatttacataaacagtatcaacatccttaactgtactttttgcctttaatttcagttttatgagtttccttctaaaataagtagttgattaaaatctcaatattcacttcctatcagtttctttcaatcagtaaaagaataatgtattcctaatatccttcaatgctttatctaaatccaacagtgttttacccccaaacctgcattcctatgatattaatagctcttagcttgattaaaacttccgatagaaaaacacttccactttcctggggcaatatgcagtgtatagtcattttctattctctgttgcaatcattaataataataattaatgtttattaaacatgttatgtcaagggagccacatagccttatgttatctagggaggcattattttgatcttagactgagaatttttacaaggtcacacaactaagtaaagggaccaaggagtctacccccagagtctgtgctttgaactattgtactatcatgtaacggggcatagtgtatgat

SEQ ID NO: 13400 - DNA, 991 bp, Homo sapiens
gtaacccacatcatcctctacgcctggctgtccatcaagaggcgaaaagcagccctatataggttctatccttggatagttccagttgtaaagtttaaaatatgcgaaggcaacttggaaaagcaagcggctgcatacaaagcaaacgtttacagagctctggacaaaattgagcgcctatgtgtacatggcaagtgtttttagtgtttgtgtgtttacctgcttgtctgggtgattttgcctttgagagtctggatgagaaatgcatggttaaaggcaattccagacaggaagaaaggcagagaagagggtagaaatgacctctgattcttggggctgagggttcctagagcaaatggcacaatgccacgaggcccgatctatccctatgacggaatctaaggtttcagcaagtatctgctggcttggtcatggcttgctcctcagtttgtaggagactctcccactctcccatctgcgcgctcttatcagtcctgaaaagaacccctggcagccaggagcaggtattcctatcgtccttttcctccctccctcgcctccaccctgttggttttttagattgggctttggaaccaaatttggtgagtgctggcctccaggaaatctggagccctggcgcctaaaccttggtttaggaaagcaggagctattcaggaagcaggggtcctccagggctagagctagcctctcctgccctcgcccacgctgcgccagcacttgtttctccaaagccactaggcaggcgttagcgcgcggtgaggggaggggagaaaaggaaaggggaggggagggaaaaggaggtgggaaggcaaggaggccggcccggtgggggcgggacccgactcgcaaactgttgcatttgctctccacctcccagcgccccctccgagatcccggggagccagcttgctgggagagcgggacggtccggagcaagcccagaggcagaggaggcgacagagggaaaaag

SEQ ID NO: 13401 - DNA, 990 bp, Homo sapiens
taaagctcctgttgtcctggaagctggagcccagcctcactacgacttttagggcaatgactccccaaaaggctgagggcagccaagtccctggctgggccctggaagcacagagggaaacatgacatggtccagcccccaggagctctgggtgcagagggggcaggcagacctgagcacatccacctcaacataaggtcatgacaaagcaggccctcagggggcttggggcttggagcagggatgtcccatagtcctctaggggatggccagggaagggtcctggaggggaggcactgggactggcagagagatgaaagatgtgacatgtgcagaaggggagggtgtgctggtgcaagagagtgagctcagaaaaacaagctggggtcagatcacagagacagctgggcttccgggatcgttgtgtgtcctttccctggggctttgggggccatagaagggtagtgagcgaggggctctgctgtggaggtcccagcctgaaggtgacagtctagtttcacgccctggctgcctcaagaagggaggggctgcaatccaggaggccagagagaggctgtcccagtggtagggataagaggcaacaatgctgagatgccctttgccctaaatgcaactccacaccccatctccatcatccacgccagggagtcccagggtccatttgttggcccacagcttctgctttcctgcgggcctcttccgagtcccccggtctctcaggaatgaagccccaacgctgttggcaagacccaccaggccttcttcagacagacacatcgagggacccgtcattccacccatgcccagcttcccggaggcccttcctgcctccactcctcccacccccgctgcaggtcactgaccctgcttggaaaacaccaggcttgctcatataaggagcgtgggccaggcctgagtattcagcgatggcatttgcatggtggccctgtctcatcttggctctgctct

SEQ ID NO: 13402 - DNA, 990 bp, Homo sapiens
ccaaaaagagctcctgagtctgaaataactgttttgtttgtttgtttgtttgtttgtttgtttgtttgttttttgagacggaatcttgagctgttacccaggctggagtgcaatggcggagttcagctcactgtaacctccgcctcctgggttcaagcgattctcctgtctcagcctcccaagcagttgggactataggagcgcaccgccaagccccctaattttgttatttttagtaaagactgggtttcgccatgttggccaggctggtctcgaacccctgacctcaagttatccgctctcctcggcctccaaaagtgctaggattacaggtgtgagccaccgtgcgcggcccgaaataactctttacaggatctcgccctgggccttcccagcccagccggcccgcccgcggggatagcccgggcactatctccctgctgcaggcggtgaggggctcgggtatctttgaaaatagatacgttcacaccctcctaacggcggcgccaagggtggtgggtcccaaaactgtttccccgtaaagagttcccccgcccggtcgcaggaagacgcctgagggggcgctcggagggatccccagcagccgccggggctggaccgtgcggtgcgcaggtgagaagccgggaggggccggacaaccccgaccgcgagccggacccctgctctgaccgcaggtgggtgcttgtcttgcttacggagggctcccgatgaaccgagtcacgttttgtaaccacattaacggaccattcaaagtcgaatcctaggcttttcgaggcagttagtgggtcccaacggctgcaggcggggccggcgggggcgcagcggcccgggaggtgcgtggttgagcgaagccgcggggcccaaccgcagtcgcggggtctgggaggtgggtgcgccgcgccgtccctgcggccggggggtgcgggaatgaggacctgagctggggtagaggtggccgagctagagtag

SEQ ID NO: 13403 - DNA, 989 bp, Homo sapiens
ggttcccagagagttcacggcgggagcgcgctccggccctaggaccgcgggtggggagacgggaaggaaggaggaggcagcgcgcgccgagccgcaggaatgcacttttcggccctgaagcgggcgcgcggagggcgagggcggagccaggcctgggaatgagaggggtggaggtagtgcaggtcccgagcctcaggagagcagctgcgcgcggggacctccacgttcccctctccccagtcatccttaacacccctgtattgactagtgtgaaaaagggagagtttggggagagggaaaactctgaaaggaaatgcttatgcttggttcctcctctccttcttccaaccccgacctgggcacgcgcctcagtgcaaatgcatgcaaagcctatgagctgtggagagtatgcctgcaagcattctcccgagcaaggtgtgtttgcacaaacgtgtgtgcacctatgattttatatgcgtgctcacatgtatgttcactcttgcatatttgcaaattcttggtgcctgataagataaatgcatgcacggatgtgtgtctaagcaagcgcgcgcgccgcggagcgagtgtacgtatgtgtatgtgtgcgctccactctcagctttgctcatctcggtgcccggcccccttcgctctccaagccccaccccccacccctccaggcttcgcttttaaaaaaggtctccccagtgctagctgccgaagcacccagataagagctggacggaggctaaagcggcagccccagcttcgcgccccgcccagtccctttcccctgctggggatcccccctcttccccgcccaccccttacccgcatgcagcccagcgccctatgctagccctccccctccccccctgctggagcggggcgccgccgggggaggagggggaatcggctgcgggtccttggtgtttccagcacccagtttcccttcaagccgggtcgcgatgtacgactgtatggaaacg

SEQ ID NO: 13404 - DNA, 989 bp, Homo sapiens
aacagacacattgggaaggctaagttagttccctccaccttttccctaaagttaacacctcacttaagttcgaaaaagtcaactggacccgcagacggcaaaagcagcacgtaataataccctgagtgagaacccacttaagagccgagagcccaaatgtgtgtttcatgacggcgctgttacagactaaaaggtcaaaacaggacattaaagggtgctccggggggctgagtaggagctcaccaggtgagaaaggggatgtcactttcggacagagaacgagcgccagggcgtggaggcgtgaaaagggcacgtgggtggcttggaagaaccaaaactaagtgttttgggggacagccagagagccgaacacatatggaggaaagatgcggcctggggcccgccagattagaaaggaaatccccctcccatatccagatcatgatctctcagactcaatgtcccctcaggatacccctctacagggtcccagctgctgggctccctctggttcccgccactcttcccttacctcgtcttccagcctttctctcactctcccgcctcctctgcctcgccggaagtgacgcgctaagtagcgcgccgtatcgcgccagaaaggttccgagggagcgggaaaaagggttccggcgagatccactgcgccggtgtgcaggctcgagcggtcaaagctctttccgggggcccggggaactactctccttgcctcgctctgtctccttcgaagtgctctgcgcgaggttcagagcggccgccgcctccaaagggacggttttctagagctccgacgcctctcggtgcccctctgctccggcccttgccctttgacctcgctctcgcggcagggtgagaggtcgggtggccatcttgtggcggcggcgcgggcggctgttactgcggagacccatcccctcccccttctcgcacccctggcagtctgtcagtcggtaaaaagtcccgcagcctgt

SEQ ID NO: 13405 - DNA, 988 bp, Homo sapiens
atacacacatgagacagagcccagctctccatcttccccgacatacccagggtggaccctcccaccagtggtccaagtgcacctgtagaccagagatcagcttattttaagagtttgtaaacctctattacatgagatatccctgaataattcagctaatttaggaggaaaatggaacactattaaaatatcaaatgtctaaaagtaaaagctttttttaaatttgtaaacagtcggtgctcatgaccttttcagaaggagcatattggtcggaaagttaacagtaaagaatacatgtgtaccaacgtaaaacagagaaattccataaggaaatggttgcatagagatgcttagtgtttatactacccccatgaaacaccggaggtcaggaatttagaggtatttaaatctatgaaatctgtgggttttgtttcattttgctgacatactgttttcccttcaaaataagagtgaacatttactatacatttgtaatgacatttacaatcaaggtgaaaatagtcatgccaaccataatcatctggagaaaaatacaactggcttggttttataggatttctcaaggaaaactgcctctcattaaaggggaccggggtcagggtaaaatatgacttggttggcactaaagagtgacagctaatttagcataagaaataaaaatggcactaatatttcatattagaacacgtattactaagttccgtgtgagaacacagtgaagccagtacaaaggtatgggggagggtaagggcgcccgcaggcccagaggccaggggagtccagctggaagggaaggcagcggggcggccgacccaggctgcgagtgcttaggggggctgcgggggagggcggggactggctgtttgggaggagcggaagggagggagagggggctggaggggaggcagggtggctgccgggagggtttgggagccggggaggccgagggaaggctgggggtctgaag

SEQ ID NO: 13406 - DNA, 986 bp, Homo sapiens
tgacacggacaaaaataaggtcaagtttctttgttataagaaaaaactccacaatccactgtaatggaaaatatttaatgagacaggtcattcattcagtcaacagctaattgttcaatgcctcttagctaccaggtactatcgaggtatggtattctttctctccccctgatctcccttctcctccttcattttctctttgtgcttctcctactcctctttttctcccttagaaatttggcaagggataaagctattacagtcataatgtgctcctattctcctggtagttggtaggaaaaaaaaagattttttgtttctatggagagacaaatctcactttcctcatcctccaacctgcctgctcactgcagctaccatcttgtatagggcctacaggaagaaagaatctatggtaaagagagaactttaatatatcaatcagctgtggtggtgagaatggatcttgaggctcagaaaaaagaaaaacgaatggagctttgaaatatctggaagttattccaagacccctggtagggatttcagataacgaaatggatgacgccagtggtgggagggcacccaagcatttatccactcaagatgcccccttcatattttatccttggtgtcgtggcagcagtgctaataggacatgagccttcttgccccagtaatggcccattacggcttcaggaaaagccatcatgtttccgcagcatttatctgtcagcaggagactattatgagagcacaaactcacattgtattagcgttatcagttaattatgatccttgggaccagtgccagccaatgggctagcagtctgctgaccatcactcagggatataactccacacccccaaattcaagcatgtaagaagacagcaggtccgcagagaggtgtggtcagggacatttcccctggccgggagcccatggagcactgtcctcagagatgcgcaggttaggctcactgtctagg

SEQ ID NO: 13407 - DNA, 986 bp, Homo sapiens
tgctggcttttgttctagattgcactatctaaatttaaattaaagttaaataaaatttaaatttccagctgggtacggtggctcacgcctgtaatctcagtgctttgggaggccaaggcaggcagatcacctaagggcaggagttcaagaccagcctggccaacatggcaaaaccccatctctactaaaagtaaaattagccaggcatggtgacaggcgtcggtaaccccagctacttgggaggctgaggcaggagaatcacttgaacctgggaggtggaggttgcagtgaaccgagattgcaccactgcactccagcctgggtgacagagtgagactccgtctcaaataggtaaaatatcaataggcaggaagccagcttggggatgtgcaagggacaacggggacaacggggaccaccggctggcggccccacctcatctgcctgccttctcctcacaggacgcaaagtaccacatgcagcgctgcattgactctggcctctgggtccccaactctaaggccagcgaggccaaggagggagaggaggcaggtcctggggacccattactggaagctgttcccaagacgggcgatgagaaggatgtcagtgtgtgacctgccccagctaccaccgccacctgcttccaggcccctatgtgccccttttcagaaaacagatagatgccatctcgcccgctcctgacttcctctacttgcgctgctcggcccagcctggggggcccgcccagccctccctggcctctccactgtctccactctccagcgcccattcaagtctctgctttgagtcaaggggcttcactgcctgcagccccccatcagcattatgccaaaggcccgggggtccggggaagggcagaggtcaccaggctggtctaccaggtagttggggagggtccccagccaaggggccggctctcgtcactgggctctgttttcactgttcgtctgctgtctgtgtct

SEQ ID NO: 13408 - DNA, 986 bp, Homo sapiens
ctttccttagcccactccactttccagctcaataattgctacccctcccgtgcgacgattccctgcccaacgtaggaaaaaaagaggtccaaaaggttatagcatcacctttgccctctgacctaggagcgaagactcaccagtttcataatggacttttggtggttcaatagcagtcactgaactcctcaaacccaggaagcgtcttccggtgcaatctccgccacctgccagccgagagcatcgcgggacttgcagtctttcatcctcacgtcccttccaggggaataatgggaaatgtagtctcccctccaggcatcatgggaactgtggtcgcctttccttttcctccctttcctctccgaacgcctccttccgtcagctcaaattcatcccagccgccaatgcatcctccctctccaccccagcatgatatcatgtcttccttacgggcctggggcccatggtgttctgggatgtgtagtcccgacggctccgactcccctttccctcctcccaaagggaaggcggatgggcacggggcttgccggaagttgtagttcccttggccctctaggcgccgggctccgcaatttttctcaggggaggcaggaactacaactcccagggacgcccggcggcagcaggtgggagaggggctgttgatatcaatatggcggttgtcagccagacaaagacagtcagtctgatgtgattgagacaagggaggtttttcagggggagactgggagataggggcctcccctcccccttctcctcttcctgcgccggcctcaacccctccccagtcccctcccgacgggcgccccacgcggaagacacccctccccctcccgccttccctcctccctatctcagcccttcgtactgggacgttggggagggggctgtgccgggcggagagaactcagcgaggattctgaggtgagtcgagcggttttgaagccggactacctcaagtctct

SEQ ID NO: 13409 - DNA, 985 bp, Homo sapiens
cccagctagactgcaactttcataaagacaagtgatacatgcatgttgtagagtgtttggcttgcagttgaaacttaataaggattggaggaaagtgagaagacacatccagattcaaatttagggacctgtgggatcatgctgtttgggttttttttgagccatttcccacctccctttgggtactaatcagtcaactgataagcatttcattcattcaactatctatcttatctatcgatcattatcatctatttatttgtttttgagacagggtctctctttgtcgcccaggctggagtgcagtggcacagtcacggctcactgcagccttgaccttccgggcccaagtgattctcctgcctcagcctccagagtagctcggaccacaggcgctcgccaccatccccggctaatgcttttgtcttttgtaaaggcggggtcttgccatgttgcccaggctggtcttgaattcctgggctcaagcgatcctcccgccttggccttccaaagtgctgggattacaggagtaacccaccgggcccggctggaagcctaatttatacttttttaaagatcatgctggcttctctgggagaatatgtaaaacatctattatacacagaatctaaaatacttgccataaagtagttacactctcggatacctattgtcaaaagggaagtctcccagaaaatatgggggcgctgtagccgccgggtcagccgagtccactctctggtacttttagagacgtcggtcgcttccgggagagtccgcgtctcccgcaccttcctctctatcaaacgccgtctctgtggtagccggggccccgcccctcctcggactctacccagtactgaactaggggcagctgggctccagagtccctcgggtctcaggtcatggcggtcgcggggcccgcgcccggagctggcgccaggtaagcagggcggtcggggaggaggtttgggagcaggagttc

SEQ ID NO: 13410 - DNA, 984 bp, Homo sapiens
ccacatctctaagcctcccctacgcagagggggccccgcgtctctaagcctcccctacccggaggggtggagtggtggtctcccctcacagcgaccgcagaggaagtgtctggggatcatcctcaagctcagctgctgggggagtcaaaggggagaagggtttaaaatctgataccaagccacacccagaaccagctataagccagaatgcctggggagtccagggcagaggtcattttaaatctgagtacagaaagattggagtctgccacagagtggggttcgttagaaggcacggctgctgctggcttggcaggcgggaggccaggcccgggcggtgtcaccgggcagctcagccaggctggcctcgcagttcccgaggcttctcccactgccctcccagggctgggggaacagggagtgggtgctctggccagcttcctactgaacaagctctgactcccagcccgctgccggcagggcaccgtgctgagcctgtggaggaccccacgggggaaggcaagatccccacctgcaggccgtagcttgctccagggagtcccagaggagggggcaaatcaggaccagcaagggctccccaacaagcaggctgggcaggggtcactggaaagccctgtcctgggaagtccccccagaggccagaatccagcctgagaggtcctctgcagagggctcttgtgagcacagagggcgagggctggcccggtgcagagggctcccagtgagcacagggagggcgagggccggcccggtggggcccagctcactggttgtgcctgcctaggacttcgggaactatcacctgggcgtcatgtcctggatcatccccgtcttcgtgggcctgtcctgcttcggctccgtcaatgggtccctgttcacatcctccaggtgagcacagcccgacccaccacaggtgagggaggcccaggcctcatggccaggttcaacatgttccatgtctgt

SEQ ID NO: 13411 - DNA, 982 bp, Homo sapiens
ggctagttgcagaacgaaactgtaagccagattgggtgtgaggaggggaagtgatagaaagattatagggtgggggagcagaggctgaggaagaattgggtcctagcttggcctggcgaggagcagcctggggagaaggggagaggtcagatcagtctgtagaaaagaaggattcaaaggactcagagtttggggtggagactgaaggaacagacaggagctaaagaagaaagatttgggatgagttgcattgggcacagagactagggagggaccaatgtgtattagaaggcctggatgtcaggcacctcagaccatttgcccatttttcaacaaaaattatctaggtctcggaggatggagaaatcaaaagtgccattttctggccatttagaaccattgtcgagtttgtattggggccaagcagtgttgcagaagaaaataagacatttagattttagttcaggtgatagttgaagaaattttaagttcttgagaacacaggctaagggagaagaaggaggaatggagggtggaagtttgcccatagtgaaggaggcaagtttaaagagaaaggtagagacatggagaaagggttggggagcagccctgggctgcaatgtgggtgagcagccaaagcaggcatccccgcaattgacttgccaccaagggaatgtggttgaatgaccaaggcaggcatccctgaagatatcagacgccaatggaatgtgggtgaataatcaggcaggcatccccggaatgattaaacactaagggaaggctgccttcctgagtacatgaccagcaccagagttttgggtccatggataaaatgtgtctcctttgtctctactagaaaatgaaaggaattgaaattaagagaagagagggagtgaagggtggcaccaagaatgaaaggagaaagaggttgagggatagtgagaaaggttggagaagagagtaaaaagaggccacttacccg

SEQ ID NO: 13412 - DNA, 980 bp, Homo sapiens
catgaggctgttcattcactcagctgacattgtttgctgggtggcactcgatggtacaagttgcctggggttgcggaagccaagaggacgtgatgtttgctgttgacaaagttccagcctttggaagcaagactcataggcagatcactgcaaccccaggctttgatacagtggaggtgcagtgtgtgtgtgtgtgtgtgtgtgtgtgtttgtgtgtgtgtgttcatgcacatgcacgtgatagaagagaacacagtttaccaggggaattcaaggaacccctcactgattcaaagtccacagactaaccctgggacatgcatctgttctgccatagtgacctgaggcttgataggataagatgggggtggcttgtacaagaagctccctaaccacactcacacctcgtccagtgacttgggggctggccactagctctgggcgtggacacaatgccctcagggactctggcactgcctgacttagcaccttaggcagaggcttgtgcagaagggagaagagggggcattttctgtctttgcctcctgccaccccagtgcagtgaccacggaccaaggaatggtcgagaaaaggcccaagtcatgtttgaaagcatgcaggagctgggacggctgtaaacagtgccactgctggccagggtgatgcaggcagctgcctggcctccagcctctcctctggggccagggccacgcacagggaagctgcagggagcacacggcgaactcctccagggccccatcccgctttctgggcagcctctgccttctggaggcagcggtggcttccagcttgccgctgtgagctgccctgtggtggccgcccctcccagtgggggctcctccctctcaccaggcttcagtgttcacgaaaaccagaggccatttaatctcccagctgggcgccctggaatgcggggagctggggagaaaggccatttccctaattcctctagtcaggcc

SEQ ID NO: 13413 - DNA, 980 bp, Homo sapiens
ggcctgctgcactttagataagactgttggcaaggaagccccggccggccccccaggggcacagaaggtggcccgcatcaggcaccagcagcacttgatggccgccgaggtggagcaggggggcattggggctgaggccaagcgcaagtccctggagctggcatccctgggctacagtgggccccacctgcccccatggggtgtccaggcaggccagggcaccgccatggccatcagcgaggagcgcaaggctggcgcctacctggacccctttggcagtggcctgcagcaggcggctcttctgccccaggaactgcctgcgccgccggacgaggtctcagccatgaagaacctgctcaaatacagcagccaggccctggtggtgggccagaaagcacccttggtgggcctgggtggcctcaaggccagctgcatccagcaggaagcaaagttcctgtcctctaagggcccaggccagtcggagaggccggactgtgcccgcagcagggagcacgacaccacgcacggcgacggggaggtgcggcagccccctgtgggcattgcagtggccttggcccggcagaaggacacagtgagccggtctgaggcagcctacggcaccaacactgcgcggcagggccgggccgcccccgccttcaaaggtacaggccctgcacagagagggaggcaggccgggacagtctagggggcccagctggccctgccctgcgccccggctccccagctcccacacctgcccttggcagaccctccgaggccccaggaccaggggatcctcctcagtgcatcaggccccccagctcgaagcggggtcactgcttgccttagctggtggctccctggccgccccaaccctctcccgtctgctgtctcgaccctgtgcaggtggcggtgggccccgttccacacacgcgctggacctggaggctgaggaggagaggacgaggctatgtgatgac

SEQ ID NO: 13414 - DNA, 979 bp, Homo sapiens
tccttggctttctaagaccagtggggtcccctcctctgcttctttttcctgagttctgtgaaattccccaatccttactttttgtctcaaaccagctcaaggtgggctgttttcctttcaaccaaagaaaggtgctcctggtggctaaaggtacatattcgacagctagatttccaggctggaatcctgccctccacaacatgcgaacaatacccgtgttgcatatagagcatggctgtgaagagttgagtgagtgcccacaaagcacttagagcagtgtctggtacatgctattactccgcagcgggaaaccacttcctcctttgtcttctgggcacttttgtgagtgaaaggaggcactaataacaatcacactgggatacctgtatatactggaatgccccaggcaaaccaggcttaaactgtattactctatctgtagcttaaactaacaaacaaacccacacaaatcacattttgttcttcaggcgattcaggaaggcctattaggcagggactgccattttctctctgagacaaacatcatgccagtaaactggcccacggtggggtggcagagggagagggcccaggtcggggcggacacccttgcctgcacgggtgatgtggaaccagaaagctgactctggatgcaggaaaaaggtcagggttgcatttcccttccttgcttctcgatgggtgattaattttttttgaaatacggacgtcccaaggccaatgagactggtgtcattccagaaaagggccactctgtgggtgggtcggtgggaaggcacctgagggtggggtcaagggaggccccaaaacagtctacacagcaggagggatggctggggctcttgagctataagtggcacctcagggccctgacgggcgtcttgccatgctgctcctgggcctgctgctgctgctgcccctgctggctggcgcccgcctgctgtggaactggtggaagctc

SEQ ID NO: 13415 - DNA, 979 bp, Homo sapiens
ttcagtaagcttccatttccacccctcgatgtgaggaaataagatcagggctgacaaacagtgatgactaataataccttaagcttgcacagcatactttacagtttacaaaacactcttatttgatcctcacaacagccaagaggcgacaaggtggctattactaattatccctagtttccagacctggaaaactctggctcagaacttgggtgacacgggtaggttaccccgcctttaagtgaccaagccgagacttactgtgccgctctcccccttggaagcctagtgatgtgcctaggtaatgagcaggtaaagtcgctgacgctgggcagcagctagacggcgctgaagctccagtaaggaatttggcattaggacccagcagaagcctggccgcccgccgcggaaaagactattggatttgctctgccgaccacacctcctcccgccccgcctacctgtccgtcttcgcacagcgcagccaattggtggcctccacatccttatacgtcattattctacgcccaggtggctctaggacaccctgtggtgctctgggtcgcagttgtcctcagagttgcctgattggaaaaatctccagggcgagggatcagtctcgaggctgccggttcccctggccctcagggatggagccaaggtcccagggcgggttttctttcctaggaagtggttgctgggttctgaggagtttcccccttggcagccatgagccggcagttctggtagtgactgctgggccctgctggacagcggtcgcatgcagctcctatgaggcccctgccgccggtcggcgatgtccggctggagctgtcgcctccgccgccgctgctgccggtgccggttgtgagcgggtctccagtcggctcctctgggcgtctcatggcctctagcagctccctggtgcccgaccggctgcgcctgccgctctgcttcctgggtgtctttgtctgctatt

SEQ ID NO: 13416 - DNA, 979 bp, Homo sapiens
acaggtagccctttttatcggtgcagctgctggcatcccctgctgcaagcttccagcttccttatttgtgtttgcagcccaatcttccaggctgttctttgttagaaaataagtgatttcttgggctgctttttgttagaagggaagttctaccgaggattttttgtttccaaaaaaaaaaaaaataggcaacgtagagtagctactcacctgcataataagagattgggttgggggctgccagagatttgcgccctatgcggatggcacatctggtcctcaccggtttttcacggtctatttagatcagatacagcctccctgctagcttgtctgtaaaaatccttgccttttttttttttctgaggcggagtctcactcttgtccccaggctggagtacaatagagcgatcttggcttactgcaacctctgcctctcgggttcaagagattctcctgcctcagcctcccaagtagctgggattacaggcacatgccaccaggtctggcaaaattttcttgtatttttgtagagatgaggtattactacattggctaggctggtctcgaacttctgacctgaagtgatctgcccacctcggccccccaaagtgctgggattacaggcatgagccaccgcgcccagccatgtgcccattttttttttttttttgagatggagtctcgctctgtcgcccaggctggagtgcagtggcgcgatctcggcccactgcaagctccgcctcccgggtttacgccattctcctgcctcagcctcccgagtagctgggattacaggagtgtgccaccacgcccggctaattttttgtattttttagtagagacggggtttcaccatgttagccaggatggtctcgatctcctgacctcgtgatccacctgctttggcctcccaaagtgctgggattacaggcttgagccaccccgcctggccgtgcccattcttaagccagtcata

SEQ ID NO: 13417 - DNA, 978 bp, Homo sapiens
acaccataattctccccactcctaataaaacattttattgttaccaaaggctgccattattccaacacaatagagaagcagagtgagagatatgccaagtgggaactggagatacgaatttgaatcccagctctaccacgatgctgagtcagtcattcaacctctctaatgcctcagccatgagacagagaagattctttctaaatctatgatttacctcattttgacagcaaaacagaactgttgcaaggagaaggtaaggagcagaaagaagaggtatcccacatggaccttaggctacaaatagatgctgaattttggaaaaaaaaaaacaataatctcaacaaatcttgaattttgtttgggtcacaatttttaacatcccaataaataagttaggtgacaaactccactgtattttataattggatggcttacaaatcaaaaaacaatgggtttgtgactctacttgtgtcatgaccctacagcctccatttacccatttcttccctctcctaaaacaggaagctttacgcttacactttcattactgccaggatactcttgtacaatatctggtgtccagattttgaaagtataaggttatttcatgaaatttactatgaacagaatagagggtgttgcatagcctgccctacagatatgtatgtgtgtgtgtgtgtgtgtgtgtgtgtgcaagagacatatatgtgtgtgtgtgtgtcttggtgtaatactgtgaatgagaagaccagaactgcacccaaggaactgtaccactgtcataaaccaccaggtcaaagttcacattttcactgcatagaaacagaactctggcccataactcagatgttggttaattagtaatatagggatactccacttgttattgcgactttgatctaaacagctctgtaaagcccattttcacatttttaaaataatatgctttagcagcaggtgaggaaaacttaaggc

SEQ ID NO: 13418 - DNA, 977 bp, Homo sapiens
catgacagcaggtagaaatgacgtggactgccgccagccgggcacagtggctcacgcctgtaatcccagcactttgggaggctgaggcatgtggatcacttgaggtcaggagttcgaaaccagcctggtcaacacggtgaaaccccatctctgctaaaaaaaaaaaatatatatatataaattagccaggcatggtgacgtgcacctgtggtcccagctactcaggaggctgaggcacaagaatcacttgaacccgggaggtggaggttgcagtgagattgcaccagtgcactctccagcctggcaacagagcaagactctgtctcaaacaaacaaaacaaaacaaacaaaaagacgtaagatgtggaccgctggagaatgggggtgctgcctgcagtcaaaacggagtgggggtgcccagctcagggccagaatgatcctattcccggcacttctcagtgaggctctgtggctcacctaagaaaccagcctcccttgcaggcaacggcctagctggcctggtctggaggctctcttcaaatatttacatccacacccaagatacagtcttgagatttgactcgcatgattgctatgggacaagttttcatctgcagtttaaatctgtttcccaacttacattaggggtttggaattctagatcgtatttgaagtgttggtgccacacacaccttaacacctgcacgctggcaacaaaaccgtccgctctgcagcacagctggggtcacctgacctttctcctgtcccccccacttgagctcagtggctgggcagcaggggatgcatggccactggccggccaggtgcagctctcagctggggtgttcagaggacgcctgtgtcctcccctcccccatccctctgtcacccttggaggcagagaactttgcccgtcagtcccatggggaatgtcaacaggcaggggcagcactgcagagatttcatcatggtctccc

SEQ ID NO: 13419 - DNA, 977 bp, Homo sapiens
ccatggggtaaagtgaagtgaagagatgggaatggtggataaaaggagagaggtaagaaacggtggattggggtagtatgggagaggaggccgggattagtgggaaagagtaggacagagtcagaggtcagtgggagcacttaccagaggtcacgggggtgagaaggctggggtcaacagagaaaagatcaaggatcagtaggagaggtatgattagtggtcactggcgacgacgaaggtcagaggtcatcagaaggaaggtgtgcgtacgttacctgcttatgaggctgtttatggggagccttcgcagaagcaggaatcatctcaacccctggagagcctacaaaacgctccctcgtctgaagacaaaaagtttgtccgtctccttgaccacacacaagaaatctggactctcttccacttcagttaccagtcgcaacggttctttagggacagccgtcgttgtgggtccccgtgcccttgcaggatagaatccaactccctgacgcggttacccagcaaccgaccagcagccaaggcgcaggcgcttcggcgcgcccagccggcccggaaaggaggcggggttgggcgcgcggcgagcgagtctccactaagccccgccccctcaggaatcacagctgggcggccgcgcgcattcggaactcccgcatgtgggtggggctggggtccccaggcaccgcctcctcatgaataatgcaagatccgggcggtgtcccggacccggaagtggagttgccgagtcaccgcagtggctgagctgctgacaggaggcggcagcggagtaggaggcgaggcaagacctgcggctcggcccggccacagccgcggtagtgctaggcaagcccacggagtcacgccggcctcagccagtctgcgaacctctcgcccccgcccacccctgcatccgcccggcccctgcccgcccgagtggtccggggaggcctagtctgcaccac

SEQ ID NO: 13420 - DNA, 976 bp, Homo sapiens
ttttcggtgccacttttagagaccaattggaggaatattcacgttaaatataaagcagtagcatcattttggaggaaattcctaacttcccgagggaatcggtgaaaggaaatagccttttattggcatttattgagtgcagagaagtctgctcagggtgtaggtagggaataatttatacaggccacgttgtcctggttttcttgccctttggcggtggatttggtcgtgccctggggtggtggaagaactgaatgggcttaattcacaaaggtcggctgaattacacagtgaaaaggcggtcgcggcggggaggcgggtggcgctggccaccaggctgagaagcccgtagggtctggggacccgcgaaagcaaagcactgagcagggggcttctgagagtcagggaccggggtgagtcagcaaagctctgggcaggctccaaaatgggcctgactgggtacgcaccagcagcagacgcgcctcgagggagcgcataaaacctggcaaagccaaagtgctttatcagccgcctgcctcttgggaggctcccacccgccagaccacgggtgcctcgcggccccgataaaccttgagctcccagcctttgccccacccctcgctcccggaactccacctcccagaaggcagcgagaaccgcacatgtggctaatctttcagcggaaaaggtgtcgcgcacgcgcagagagcgcggctccggcgcagactcggcgcctctcctcaaggccccgctcgccccgcccaccgggctctgcgcactccgctcctttcctgcgtcaccgctacacatgcgccttgcaaggaagggcgagatttcgggggcagggcggggggcgggcctaggccggggtctcacagcgactgcgcggacgggttcctgagtggaacatggcgacttgcgccgaaatcctgcggagcgagttccccgaaattgacggacaagtcttcgactacgt

SEQ ID NO: 13421 - DNA, 976 bp, Homo sapiens
tcgcaaaatacacaagctcaaaagctcatggcgttctccccatctggcattctcggccttagaatagcaaacgttagggcaccattaggttcatagttgccagacccttcattttcttttttaatctttaattttcttcttaacaaggaagacattccgcaaaaaataaactccctcttttgagctcctttctctgaagatggtaactggaactctcattagtaaagaacctcgagttccagttgctttggacggagtttctcgcttagtattttgctctttggcagtttgaaaagcagtaatcttccaacttcgcagctccctgcactcgcgcctaccaccctgatctatttggctttctcctttttggagccactttaaaaggtgcagggtgctgggccgctgtggcctcgggctgagaggcggggagttggtgtccgggaccagaaagtttggcagaagccacggctctgggcccaggccccgggcttccagagaagtgtgtcattatttgttttctgcaaagccgcgagcgggcccacgctgcagctctgcctccaggcgtggaacccctcggtaatccgggtgaagctgggttccgagtgtggactgcttcggctctgaggaggagggagcccaacgggccaggcacgggcttcctcctggctttacccattggcccagagtccccggtcccgccgccgctgccctctgctcacggggaccggccatcaccgcgctcccagcctcggctcgccgggggcttcgctacgcaatgcggcggaagcggcccgttggagccgccgtagcgcgggaagtttccgttgccacggagatgacctctgaccctagggcgtctctgggacccggcagcttgtgctgttgttgctatggaaaccatggcggccggaagccgccgcgcgggagagacttggggcgcgggtcggggctagggctcctgccctggcagagatct

SEQ ID NO: 13422 - DNA, 975 bp, Homo sapiens
cccagtgttaaataagcgaccacagcaagaggtagaggcgcagggactgaaatgaagacaaatatctgacaagtttaaaacacgtatttaaaatagaatttataaaatgcttaatctgccgactcaggagcccgcggtgcagggtggggtgggagttggcaggtgaccgctacaccagcagagtaagactgcagggctgcggccctccctcctatgcccttctgttcagacacccgaggggcccatgtgcactcctgggatcatacgaccagaaaacaggaccctagaggtttcttgagtttctgcttaccagggcggctgggtatagccctgccagcccattgcataatcttctaagttctccccaccaccctccattccagcagcgaggtgcctgtgacgcggtctccatcctctcggcctcgacccggtggtccccgcgattggacgcttaggcggtcaccaggcctccttgttactaacgtgtgcacacctttcagttctctcatcaggatgaactcctggaaattgctgggtccaaagtgtttaggaagtctggagtgattcttgttgcagggggaagagggaactatggaggtgtcactgaactttcaggggttccgggaccccccaacccggtgcccgtcccagctccccgagcgcctctcttcccccatcccccacctcgcctgttttcacctcccgtggcctcactcccgccgcgcagctggaccttgcccggggcctcccgatcccggagctcgaatcccagccggaccagcccagcccgaccagcccagccccgcctcttctccggcaggatcgcggccgagcagtctgcccagagacttagcgacagacagacgctgggacccacgacgacagaaggcgccgatggccgcgcctgctgagccctgcgcggggcagggggtgagtgccccccatcgcgccccactctccttttccaggcttggt

SEQ ID NO: 13423 - DNA, 974 bp, Homo sapiens
gcaatccaggacttattgcatgttttaagtcggcttcacccaccccgagttccgcagctctgtggggctactgggtctacggttcgagtgctcagttggtgtcgctttgggggaagggggtagggggaacggggcagcacctccctcctcgcgacggcgcgctaggctccgcccctcaagcataggtagcaggtccagcctctccgctcgtcccgcccttgcgttttcatctgtaagtggtctcttggctccgcgactgcagcctgcaccgcctcgcccactcctctcgcgcgcagcaagccccgcctcctccgttacgaaagagcgcttctggccccacttgctctcggctctattgtccccgccctccgcgtctccggccccgcccctcccaggggccgcgtacgcatgtgcgccgcagtggctcggcgggctgcggggcgggacctgcacgaaggcccgcccactggcgctgccggctccgccccgactcgtccgggcgcgcaggcgccgcccgccccgctggtctgattagcataggaccccgggccccgccccctgctttgcatgcgcacggccggccccacccccgctgtcagctggaggaagcggagtaggaagcggccgcgatgtccttttgtgtcctacaagcagccggcggcgccgccgagtgaggggacgcggcgcggtggggcggcgcggcccgaggaggcggcggaggaggggccgcccgcggcccccggctcactccggcactccgggccgctcggcccccatgcctgcccgaccgcgctgccggagccccaggtccgggggcggaggggagcgctgccgcgggggtgggcgggcggggcgcgggggccatgtgcgagcgcggcagggaggcgggcggggcgggctgcaggcggggtccgactctggggccagtccgggccacggttgggacccagtcgagggtcggactggtcagggtt

SEQ ID NO: 13424 - DNA, 973 bp, Homo sapiens
acctacacagggtccgctttactccaatcgcgccctccgtccacctctatgggccgctctcccattcccttaagttcccacctacattgttcccaagactagttctctttatcccgaaccacctcccggatgtagggccctgggacactaatctttcaccagccactttacagactctctgggccctcgtctctacgactcattaggtgaggaaaaggcctggaaaggatggtagagaaaaaacagagaattctcaccggctccgggatcctctcctttcccggtttgcttggacgtggcagtcccgcctttagatcccgcgagaacaggaagttccgttccaccttcgccctaatgcctttaccaatatggcggcactccggtagcgacgaatccatcctgcactgacacgcatgcgcgagtgtggaggtgatttgaggggagggtgggcgaggcgggctaacaggccggaggagaccgcctcctcggtttccaactagacgagggggcgggaactcgcgccgagacttcccgtctgtacaaagatggctgccacattggcgctgtcattttggtactgagcagagcgacgggcttaattcgacccaatccaggccagagtctttctctcaggggcttcctcgtgctcagctaatcctccgatcaatccttgggaatccctgggacctcttcggtatccctactctcagccagggatcatgtcttgggccgctcgcccgcccttcctccctcagcggcatgccgcagggcagtgtgggccggtgggggtgcgaaaagaaatgcattgtggggtcgcgtcccggtggcggcggcgacggccctggctggatcccgcagcggcggcggcggcggcggtggcaggcggagaacaacaaaccccggagccggagccaggggaggctggacgggacgggatgggcgacagcgggcggggtgagtgccccagcagaag

SEQ ID NO: 13425 - DNA, 971 bp, Homo sapiens
actttctaagaccagtggggtcccctcctctgcttctttttcctgagttctgtgaaattccccaattcttattttttatctcaaaccagctcaaggtgggctgttttcctttcaaccaaagaaaggtgctcctggtggctaaaggtacatattcgacagctagatttccaggctggaatcctgccctccacaacatgcgaacaatacccgtgttgcatatagagcatggctgtgaagagttgagtgagtgcccacaaagcacttagagcagtgtctggtacatgctattactccgcagcgggaaaccacttcctcctttgtcttctgggcacttttgtgagtgaaaggaggcactaataacaatcacactgggatacctgtatatactggaatgccccaggcaaaccaggcttaaactgtattactctatctgtagcttaaactaacaaacaacccacacaaatcacattttgttcttcaggcgattcaggaaggcctattaggcagggactgccattttctctctgagacaaacatcatgccagtaaactggcccacggtggggtggcagagggagagggcccaggtgggggcggacactattgcctgcacagttgatgtggaaccagaaagctgactctggatgcaggaaaaaggtcagggttgcatttcccttccttgcttcttgatgggtgatcaatttttttgaaatacggacgtcccaaggccaatgagactggtgtcattccagaaaagggccactctgtgggcgggtcggtgggagggtacctgaaggtggggtcaagggaggccccaaaacagtctacacagcaggagggatggctggggctcttgagctataagtggcacctcagggccctgacgggcgtctcgccatgctgctcctgggcctgctgctgctgctgcccctgctggctggcgcccgcctgctgtggaactggtggaagctc

SEQ ID NO: 13426 - DNA, 970 bp, Homo sapiens
gcctagaaactgcaaacaagctgaatttattattgtgaaaatagaatgagaggtccaagaaacctgcttcccccctccactttttttttaggagacaggtttccctctttttcaggctagagtgcagtgggatgatcatagcttgctgcagccttgaactcttaggctcaagtgatcctcccacctcagtcccccaagtagctgagagaacaggcatgtgccaccatgcccggataatattttttatttttattttttgtggacacaggatcttgctatgttgcccaggctgatcttgaacttctggcctcccaaagtgctgacatgagtcaccgtgcccagccctcctccctttttaattggaatctgtttatttatttatttctctctgtggcccaggctagattgcagtggcatgatcatagctcactgtaacctcaaactcctggcctcaagcagtcctcccaccttggcctcccaaaaagtgctggaattacaggcatgagccaccttgcctgaccactcctccctttttaactggcccttctctcctcccttcatggctgttatcccacaaatcatgggagggtagaagatgccgaggagttgataccagtgccctagcatttcctgttcccttgctgggaagctgtgtaggatcctatcagggttattccctgatgtctgggtgagctcgaggggagaggctgagccctggcactactctctcctgcagcgtcactggtgtaccgcctgccccagtcgtgggtggggcccaaactgccctggaaactcctccatgcagcgctgcacctgatggccttcgtcctcactgttgtggggctggttgctgtctttacgtttcacaaccatggaaggactgccaacctctactcccttcacagctggctgggcatcaccactgtcttcctcttcgcctgccaggtgggttctctctgttctcctcctc

SEQ ID NO: 13427 - DNA, 970 bp, Homo sapiens
agctcaggatgaaatcagcattctagggtcagcaggcttctccctgctaccacgtgtccagaagcacttccacaagccagggttgacatcgcccaagacgaggcgtgacccggggcgggggaggggacttcgcccgcgtcgcgtgaaggatgccctggccttgggctgcaggcgcggacccccgggggctccccagggtgtaggaggcggagactgatccgctctagccccgagcggtccagcgcggggcgactcgcccgcatagtggagattccggcatgaggcggcggcagtcaccgcctggctgccccgcggaggcccgggagagccgctgcggtctcgggaggccgggctttgggacttgctggcccgaccgccagtcgccctggggccttgggaacagggaaatgcgcgcgccgaggcggtggcggcctcgctgctttcagttttcattgagtctgctggttactgtttaacgtccccacccacgtttcagtttgtttagtaaatcgataggactgtgagagtcaggccgctgccctgtcgccattgagcaaagctaatattctcccagcatatggtctaaaatctttgctagagatcgggaaaaagaaacaaacaaacaaacaaacaacaacaaaatccttaagcttcctctcccaagtccccccatccccacccccacttcccacctcctcgctttcagcaaacttcccagcctgggaaaagtgcggcgcgggacagcgcgacggggtgggtgggggacctgctgccgggagatgcggcggcggccgcgcggctgactgcgactcgggagctccgggagcggcccgcgcaggtaagtttctccgccgccgcccggggcccgggctggccgcagcgcaccgccccggcggctgccgggcaggaggagcctcggttcccctcgggcggctgaaggaggggctgagcctcaggacccctaggccag

SEQ ID NO: 13428 - DNA, 970 bp, Homo sapiens
acgccccttggactagttaaaaagtacacccaaggccgccgctccccttctctgggttaattttaattattttgcacctgcgagagccaggtggcctgagttgcggcactaagtggaaaccggcagcccagccttggcctgccttctggccgtgtcttctctcctgttctgttctccaaggcagcgcctcctccaaactcaagcctggaattgggggctgggttcggtctcaaatgaaggacagtccgccgaaacctatgtgtgaccaaaggaaaatcccttgccctttccgggtctccgtgtccccagctgtacaatgtgagctttagagtaggcacttcccaaagtccctcctgaacctggaactcagtccctgagctcgtggccctgcgtgcgcagtcctcgcgggataggcccgaatgctgcctttccaaatgacaagtcccttcacttttctgccaagggaagccttggggcttcctaaggacagacagagcccgatgggttgggtggtgcctgtttaaaggcagctttggcaagtggtcctgttgtcggaagctcaagggtcacacttctgaggacatttttaagggagacagagggctggaaagggtcaagtggctacgagtcttggcaagtttccgggggcggccaaggacaggcagatgctcatgccctttgacctagggctgaacagggggttactcaaagctgccttttgatggggagaagggatgtgaggtggggattcactgtctcctctttccctcattttggggggctgaaaggcaagggaatcgaacgctgcctgtcttttcaggaacaaggcaacgagaagaccaacaacggcactcactacaagttacagctcctctacagcaacggtgagctcttctacagcaacggtgagccggcgcctagcagccggcttccgggccgcacgcgctgaccttgccatgatcactctcag

SEQ ID NO: 13429 - DNA, 969 bp, Homo sapiens
taggcacattctcggaggtaaaatgacgtgggcaaagttccctggctcgtttggggaaaggctcagcagccgggccaagaaaggtctttgggggcgcaagtctttggagggcaggtctttggggagcgctttgagtaatattagagctttcactaaaccctggcctattacgtcccctcccctgagatttacctttatatactcaagttctttcatgccaggaaggtaggctgaaggcttcgaaaacctgcagctcatacccaaagctagcactgtctatccctggagacccagcgcccaaaagctccactgggcgcatagcgcacggcacgcctcctcccccgagccgcagactgagtaactggccccggactaacctgaccaggtcggtcatgcaggagcccaccactaccaccgccgccacctcctcttgccactgcctctggggttccccagacgccgccatcgctcaaaggtgctgctgtccaacctggacggtgacctctgccctttgcccgaccccgtaaccagagacgccactcctgccctccctaacgacgcgggcctttcagacgcctacgcgggtcgcccacctgactgcccgaaatcaccccgcccaccaagtgtcccctcttcttcctggaatagtctcggtgcacagcctcacgtaacagggccctcctgatatggcgagactccgcgctcctcgtcactcacggggcaggcgctgaggaaggaactgtcaggcaccgcggggacgcctttccgagcgcccggctcggcgcggcgcgggggcgcgcacgccgcccagcttcggggccgcagagggggcggggcgggacgtccggggagtgcgcacgcatcctgcccgcggcgcgcgcgcaggtcggtgcgtctgtcgggggcgcgctcgggtacctgtaccccacgtagtcgccggttaccgatcggactaagttccaggtacct

SEQ ID NO: 13430 - DNA, 969 bp, Homo sapiens
gggaccagagatcatagatggtgaagttaactaagggcctccaaatccgtgtcctttgtgccaacaggtgtgccaggctgctcacaagacaccatggtacgagaaaggatttctcgtagtcacctagacaccaggtttatggctgtgtcgcagcaaagttgggtgtgacttatgattttcgttctgaaccttatttgttagataggtcctggagtccttaaaacacgcaggtgaaagtcagggagtaggagccatcaaaattcgactctggtgggactcgaacccacaacctttgaatgaccacactaggctcagctagaagtccaatgcgctatccattgcgccacagagccggctgcggaacccggccgccccgctcacctctgcctgaaaccgccctcttagcgagcttctaggtgtggtgctgggtgtttgctgaactcggccggggcccgagagcgtgctccgggttttcggctgtggtgtggactggggtgctcttcctacatccgggcgctggggacagcagggggcaagggccggggtcggcagggaggaagggccggggtgaagcccgcctgtctcctcgcggactcgggggtctcctcggctgggtggggccgcgcggcgtggactacaactcccagcgtgccgcgcggcggcgccgcccgaagccgttgcgcgagcagggcgggctggggccgagcggcgtcaggcgcgctggggctgcgctgcgccgccggctctgtggcttgccggcttcggggaaggtgcggcaggcggtgctgcggcctggcacagcaggtttggggtgcgggaggcgggcggggtaggagcgcggcgggcggggccgggcggcgggcggggctggcggggcggccgggccatgcagggcgcagagccggctaaaccctgctgagacccggctccgtgcgtccaggggcggctaatgcccctcacgctgtctac

SEQ ID NO: 13431 - DNA, 968 bp, Homo sapiens
tttcagtttttgagggcaggttaagtattataacagctaacatctactgagcatttgtctttaatcctagtgaaacagatgttattagccttgttttatagttgaggacattgaggctaagaaaatttaactagagtaattaaggcacacacagaatttaaacatgtttcttatcacaagactgagttgttttccagttactctatttatattttttcctaatatctggcttcaaagtaccttctgttatttttaattccaagccttagagttaattatttgggcaccttagaattatttgggcacaactgtcccgaaaccagaaacgagggggcgtggacccagagactactagaatgcaatgctcgaggcattgcagcctaaaagggcggcagctcgccccgtcgcatgctgggaatggtagtttcctcgctctcccttcttcccccgccctcgagcatccagattggagctccgttcttactcccttgcagggcgccacggctcgacagagccactcgtcctcgcctggtcatcccagttccggaggctgacctggggatgcgccctggacgccctgcaccgcagtccttgcgtcgctgctagtcagcacggcgttacccacctcatccgcagctccaggacgccgcactccacgcgctgccgcaaggaggacgcgcagcctggtcaccatggaaacggtgccgcctccgtcacggctcaagcgagaggtcaaaggtcagtcctgcaagttccgcttccggttccgagatcctgtttgttttctgaaagctttgtggtttcggtgagctctcagagccgatttctagcgtccgtgccggggacaggtgtccagaggtcgactgctgcagacatggcggcctccaccgcggccgggaagcagcggattcccaaagtggccaaggtaggcgatcgcgaggggccttgtaggaggtggcctaggaaag

SEQ ID NO: 13432 - DNA, 967 bp, Homo sapiens
ttacaaatggagaaactgagcccactcccccagatcctaagtcccgcttgatgtaaaggaaagaaccctggcgtaagggtctgggtctgaggtcccagttccggcctggtcacctttagcaacttcctgcccctctgtcagcgtcagattctccatctgtgtcagaggtggaccggcccaaggaaaatagatcaggaatcgctgactccaggagtctctatcccagccccttcgcctgactctttctctggctcccgcggtccctctgagcgattaatgctacataaggtgtgggcagagctggggtcgtgcctccagctgggcaactgcctgtctctctgggtgcctgggtttgctttcttgggcctcggtttccacttctgtagagtggggtgatagtccagcacttcccctgggcgtgtgaaatgtccagcactgccaatattcgttgctgttatcttcggagaacagtgaggggaaaggaatccttgcctgggctgggccaggcaggaggctgggggtcaggacctggaagaggcttccaggtgaggcttggggtggagcctggtgacgaaagcgttaagcccaaactcggtccctggaggattagaggatgatctttaagtccccagctgtcagccctgctcagagcgacagtcctggcagccaatcagatgcgaggacggctgcgggttgcgctcccattggtttactccacccctggggtagcggagcctctttatcgagtgactactgtttgcctcgctctaatcagagcttccaggaaccctgcgctgtgggataaaggaatgaggttcagaaaggggcagggagttgcccgcagccgcaccgcacgtcttcagcccgaccgttgtcctgacctctctgtcccgtcccctgcccagtctcaccatggccttctggacacagctgatgctgctgctctggaagaatttcatgtatcgcc

SEQ ID NO: 13433 - DNA, 967 bp, Homo sapiens
gcttggtcattctctgtgtttccacttgtaatttgaatggttgattttatcttaaaattccagtttgcctatatagttaaaacatttacatacttttattatcaagcatagatttgattatttaacagtaggtattctattgtgaatgtatgtatgtatataaacatatcacatcatatttgaccagatagttgaaggatgaaatgtccttgagttttgaaaacatctgtatgtgtaatattgactttactttggtgaatttgtttgtaagaaacaaaaagttatttgttctgcaatgtctaatatctccctctccattctaaatggtacaggtagtctgtaattgaatttctaagtagctactcaatcattcggtcaagacgtagttatatgagtacgtactttgttcaaggtgctgtgctgtaaaaagatagtggttattgggaaattaaccgataaaatatagatcctgttcttaagcagattatgacctgagagaggtgataagacaaacatacaaatacctataatagtaattgaatgtgatgagtgctgtgagacaggtcctgaaacagtgctttgaacattcagggagagggaatgattattgtattttcatttgagaaaaatcagggcaagttttatggaggacttggtggtagacaaaagcattgagggcaggggatgatttctttaagaatagagacaaggagaacagtatgttcaggaagattaaatagcaaagatgaaaagacggagtaatgcaggggaaagtgcaaggagtgtggcatcagctgaagtgggagagggaagcatatcgtctaggtgtagtaagaaaacattggtggattttaatggagggaggtggtggggagcagtatgtagtaagtatgtagatatggatgaaaatgagaaatgtcaattttccaaatttacgtggatcttttcttggcaggttttatacccc

SEQ ID NO: 13434 - DNA, 966 bp, Homo sapiens
gacaaaggatataaaccccacccaactgccatctgccatgtccctgattttgtccaaagtcacacccacagtatagggaaggttttggagggggtgatcgctgcagagggaggtcaggcacccctgctggttcttgtcccggcaacccccagcggctccccaaggaagccaggcagaggcttctgggccaggctggctttggctggagccagctgcactgagtccaaggtgcgtgtcagccttggcccagccagcggtgactcatgctgggccccagcccagccccaggaggtgatccaggacagcagcctgacttccccttatagcgctgcggctcagggtcagtacccacttttgccgggcccagtggggatcccaagagatcaagtccggccccaccccaaggagcccgcagtctcagagccacacccaagacatcagtgagaaccctgactggcccgttgcaccccctttttggtcccttcccatctagccattttacagcctcaaattctttgagttgtttgtatccccagacatggggcaaattccagcatatagtaggtgctcagaaaatgcccgtgggatgaaagactgaaactgcctctaggtacatggagggggagatttggggttccctctgtgctgagaaccctttgtactcaggatgagccggtgtaggtagcaaccaccatgacctttggccctgccctgcatcctgttccccaacctctggctgtgccttctagaatccccaccccctaagagctgccagggattggccagaacttggctttgagtcacaaagctgctgcggcaccagggctccaagactggccgttcagactgctaggtttagcttcaggggcaggtgagtggggctggtggctttgggggcgggtgagtggggctggtggcttcaggggcgggtgagtggggctggtggaggacttgtttgcgagggtt

SEQ ID NO: 13435 - DNA, 961 bp, Homo sapiens
tttttgtttgtttgggcagctttggttttgtttttttgttttcttttgagatggagtttcgctcttgttccccaggctggagtgcaatggcacgatctcagctcaccgcaacctctgcctcccaggttcaagtgattctcctgcctcagcctcccgagtacctgggattacaggcatgcaccaccatgcctggctaattttgtattttttagtagagacggggtttctccatgttggtcaggctggtctcgaactcccgacctcaggtgatctgcctgcctcggcctcccaaagtgctgggattacaggcgtgagccactgcgcccagcgcagctttggttttatttgttttgtttatagtggagggttagacatgaaatcaacatagaagatgacgtaaacttatgactaagcctggtgtgggctctcggtgttctggggcatgagctagaggatggctggagccaggtagagaccgctcccttccttagaatgtcaccttgctgacaaggacagcgctgtgagcatccacaccttcctgtgaggtatctggcattgagcctggtcaggaaacaggaagacaagcaggttccattgagcctgggacctggaccttgtaaagccagccacccagcccagttttacaggccaggcaacaaagggagcaaccggctggacccaggcctgcctcccccgtgcagacccgccgtgagaacaccgtgttctgaattgagacgtgccttgcactcactttgtcccagtaattgcccccataaaatagacctggacactaagaggaaacttcccatatttggaaacccagtcctgcctgctttttatagctggtgtcgaggacaagagaaccacaagccgtggccagtctgctgagagaccactgagggacagacgggttgtgggcctggagcagccccggagggaaggagcatttgaaagtggacag

SEQ ID NO: 13436 - DNA, 961 bp, Homo sapiens
ctttctttgcacatgggcttcagaatgttaaattaaaaaaaaaacttatattttcttttttattaacaacatttgaaagcaggaattatattttttttaaattttagagctgagttacaaggaggaatttttttttgtatgctttgtctttttctttttttttctttaaaagtatttggaaagcagtctcatgaggctggagcatgggtgtttcatttctatcttattttcttcctccagcagcatgagtgtcctcttggcaacatgtatttttctaatttaggagtgtttctctacatgtcaatcttgttcctctggatgtccatggcatggctcattgtgttctccgtatttcaggacgatgctgcaaagcttgagcagtattttatcctccctggactctcagagagacatgggagtattgatgtgctttgtttccaagcttagacaaacatgttgtagtagggaaacaaacatggaaacctactactatttcataatgtcttatttcaaagaagtcttattttttttttaaagtatcactattgagatgtgcacacaatagggctttaagaaggatgtaggctgttaaaatgcagggcagtgaggtgccatgagcagtggttccattgtgccttgctcagtaaacatgctgctgccctgcctcctcaaagggcacaattgatggttattgatgacctttctgtaaaaccacaaccttctgtctttttcctgatttcaggtagatgcgctgagattacgactggaagaaaaagaatctttcctcaataaaaaaacaaaacagctacaggacctcacagaagagaaggggacactggccggtgaaattcgtgacatgaaagatatgttagaagtgaaggaaagaaaaatcaatgttcttcagaaaaaggtgagtagctgacataagaccttcaagtggggtatcatccatgttttgtca

SEQ ID NO: 13437 - DNA, 961 bp, Homo sapiens
ccaaaaattataggttctggggcgtttcaacatttcacctgagatggccagaacgggcgcatctttagacctttaaaacctaaattaaaaactatcagtaccgaggaagggccgaagagctcaatacccacccaatacaacccccacttccgacctacagacgctctgctgagcggctgggagaatccgtcgcgccagtcagggcccggcttcttccaacaacagacactttgcgagccttccagaagccttggctaagcgagaaggcagggtggaggccgccactgcgaggacggtccccacccagctgcgaggagctcgcggttccccagaggggcgggcctgcgtccgggtaaccgtgcgcgacgtccacgagtttttaggacgaccagcccttcagcctctaggccccgacgcctgcgccatttaagccacatatccgcccgcccggccgcggccaaggccggcggcagctacgtagccgccgccgcccggggccccacagcccacgggccggatggaccgagcgccggctgcggcgttccggtgcgcgcgcgcgcctcagccaatcgcgttctcgcccgccccccgccgcggcggcgaggctggcgctgggaagaggaagaagaacattcgccctcctcctaccagcgcgcgggcggcggcggcggcggcaccggggtcacgaactctgacctttcactgacaaaaacaataacaaacccccccttctccgcgaccccggcggcgcccccgggcccgtccccgccaccccgctcccacctcggcgtctcgtctctcgcccgctgccccgcgagcccgcggcccccgggctcccgccatccgccgacaccgggagcccgggctccccgcgccctgccctccgcgccgggggccgcccgccgcagacacgggacccgcttcgaggccgctttggcgccaaatcctgaggtaaaattga

SEQ ID NO: 13438 - DNA, 960 bp, Homo sapiens
caaaacatatccagggaggacaaactctgggctggacaatgtatccacaagggggtgtgaacatttccccaagcaggaaactaaataatcagtgtcttagtggggaactcgagcaacaaatctgtgagatatttattccaataaactttctaattctctgtttgattcatatgctatcttgggtgctggagggaactgctgctttctcttagcctagtctggggaaggggaaacagcggagaaggagaaggagcgaggcagggaggccccaacacgtagcacaagggtattactaggtgggtagtgaagcagtaaaagctcttattccaattctggctccaacagtaatttgtgagcaaattactccacacccctgagattcggtttcttcgcctttcaaaatggggactcagaacacagtgaaccagaggatggtttcagagtcctcaacttagtacctaatgcactgtgagagctcggcgagttttagctactactactgtgcgcatgtgacccaaggagggcaagagaaagcccgggaaaagcgaactgtaacacacgccagagcttcctcccacggatcctcggagtccgaaacccgagcgtcgggcctgcccgccccagccctgaccccgaccccaaagagcatcaccccctcaaggctcgccacccgcctccttaccatggccccaccacctgctgccggaagtaaatcccaccggcccccggaacccctaagagcgcatgctcgaatgtacaaggcgggcgtgatctgcgttgcaccctgggagttgcggtccaggaatcgtggctgccgctactcccaggcgttatgggaacggagtcccctcctcttcccgacgtgccctgcgactcagcggccgaacccggaagttccgggccgagttcctcgtgccaacgtgtcttgtaaggtgcggctagaaactggggacatggcag

SEQ ID NO: 13439 - DNA, 960 bp, Homo sapiens
cacagtcaagggaagcagagaataactttaagccaaaatttcctgtggtgagttttccgcagccatccacaattccaggtctcaggaggtagtctttatcttttcccctcacgccgatgccacggggcggggggggaaggcggaactcgggaccagggaccagggaagctgagactcagctcccttgggtgagattcgcgacaggccgggaacgtggtcagccgcggtcgctgccaaggtgatatcgggtgggagcaatgacgcaactccggtttccacttcggccccccgggatattttaccctaatctgtgggatcaggctgagcttcctggcgttctgcagcagtaacaggttggcgagcggagcccgggatttcccattcgtgcggagctagccgccggtgccagtcggcaggcgccccccagcgtcccgcggacgacgaagtcctggcctggtcagcccaggtgggggtgacgcacctggctcaggcgtccgcagcaggctgggtagaaccacggcaggaagggtggggggctgcatccccgattaacacaggctgaagcgggtatccgcacctataatcatcgacaactctgtcccacagagggcagaagcgtgccttgccctatggacgacggtcgatgaaaatttcacgagttagagtatctaaggctacagcgtggcctatagggtggttgattccaagtcaagatggttgcagcgccaacggagctcctggcaagagaggactggacctgtgggcggggcggaggggcggggcggggccggggcggggcctgaccgagaggcggggccaggtgctgggctgtctctgcttgtcaaaaggcggcagcggagccgtgtgcgccgggagcgcggaacagcttgtccacccgccggccggaccaggtgcgaacccgggagcagcgggaaagggggtctcaggatagggactcgg

SEQ ID NO: 13440 - DNA, 960 bp, Homo sapiens
gacctagacagggactcctggactcttactttctaaccagcctggcgcccatggggtggggttgggcattctgggaaaggctgggcctggaggctttggaggggagggcctgagtgaccccttgatgacttttgtctccctttcccgttattctccctacctgcccccccccacctgccccccaccccatgtctctatgggcacctacttggcccctcatcccccctcttccggccctctcctctctacccctcgcttcccttcctgtctctccaatctcctctcctcccggccttctgtgccccgccctcccctcccccatctcctgtccctcccccgtttcctgctgcccgccccccccccccccgcctcccctcccgcccccatgtccctcctgtccccgcctcccgcagcggtgcagcgcggccgcatcccgcactcgctgcctggtgccgtggccgcctcctcgggcagccccccgggctcggcgctggcggcagtggcgagcggcggagacctcttcccggggcagccggtgtccgaactgatcgcgcagctgctgcgcgctgagccctaccctgcggcggccggacgcttcggcgcagggggcggcgcggcgggcgcggtgctgggcatcgacaacgtgtgcgagctggcggcgcggctgctcttcagcaccgtggagtgggcgcgccacgcgcccttcttccccgagctgccggtggccgaccaggtggcgctgctgcgcctgagctggagcgagctcttcgtgctgaacgcggcgcaggcggcgctgcccctgcacacggcgccgctactggccgccgccggcctccacgccgcgcctatggccgccgagcgcgccgtggctttcatggaccaggtgcgcgccttccaggagcaggtggacaagctgggccgcctgcaggtcgactcggccgagtatggctgcctcaaggc

SEQ ID NO: 13441 - DNA, 959 bp, Homo sapiens
gctggttgctgtctttacgtttcacaaccatggaaggactgccaacctctactcccttcacagctggctgggcatcaccactgtcttcctcttcgcctgccaggtgggttctctctgttctcctcctcgaggttcccagagccatgagctctggttgggggttcacttgcatgagcaccaaatattcctctgctcactgcttggagagggacttgcagattgttatcttgtagaactgacagtttattcaagggctgtgggaggtcagtggcctgaacttaccctgttccttttatccctcccattgcccgtctctcgtcccagagccctctctgctaactttgtcatggcacgcactatgctgactctaatcagccatctggcttccactttccccactcccacctctgtgaaccaaaagaattcttgaagtggtttccatattctgatctcaggcctgtgcgagtgaagagttttatgagcaaggactggaaggaaccagagacaaacaaggtggttgggtttgctgggagtgggatggtagctaagcatgtcatttactgttcttgttgcttgggtaataggccacaatgaggaagctagcacggtagtgggcaatgccaggtgggaaggtttgagttgtgaaagaagagccagggagcagagatggggaggaggcactgatggggtgggatgtgctttggtcacacatagcacagtcgggtgtgtcctcccttttgtccacagtggttcctgggctttgctgtcttcctcctgccctgggcgtccatgtggctgcgcagcctcctaaaacctatccacgtcttttttggagccgccatcctctctctgtccatcgcatccgtcatttcgggcattaatgagaagcttttcttcagtttgtgagtgcagtggggtccccaactctaaggtgaagaggagggaatagggtcttcaaa

SEQ ID NO: 13442 - DNA, 959 bp, Homo sapiens
ccaagcctgttgttcatctcttaagtggtctttctttctctcctgtctcttgttgaattcctctcttttaaactcactaaaatgaaaacattttgaaatacatggtttaaaatgtctgttgtttcctttttttttttttttttttttaaccaagtcttgctctgttgcccaggctggagtgcagtggtgtgatctcagctcactgcaacttccgcctcccaggttcaagcaattctcctgtctcaactttctgagtagctggaactataggcggacaccatcacgcctggctaatttttgtatttttagtagagatacggtttcaccatgttggcaaggctggtctcaaactcctgacctcaggtgatccacccaccttggcctcccaaagtgctgggattacaggcgtgagccaccacgcccggacttgtttgctatttttatcaacattttaactctaaagcaggtgggctttgtgccattgacctggccagcagagatccaagcagtaagtagtgagaggactgttgggctggtgacagaggagcacagaggatggtctgaacacacaggcaagaagaccagaaacaagctagggactaagtcatctgaggagggtggggggaagtatggtagtcaggaccatggacagctcagttggtgctgctattctgacatcgtgatgtgctgtgttctgacattgtgttattctgacatcgtgatgacatcgttgatgtagcactccagctcccctttccaatgaagctattctgcagagtcctaggttcctactgttgtgatgagagattggtctcgtctacagtgcctttctgtatgtgagccaaatagtaggtaggcctacaatttttgtttccactaaaaagttactctgaaaatgtactaatttaacttcattataaggcttgtcagttacccataatcctgcgaggacgtgttaa

SEQ ID NO: 13443 - DNA, 957 bp, Homo sapiens
atgtgcttttcctttgcatttgtccaaggccagaatccttggattttgatgctccttcttcccacaaaacatagaagatactgtgtattgaaagggtgtgatttttcatagaatataggctacagaacagggctggactttttttttttttttttaagaagccgagagcctatgtttatataaatatcctatgtaattaaaaagaaaaatacagttaaatcccagaaataaaagaaatttaaatatagaaaaatatataacttatcaattgaatgtttccaaacagaagagttttagcttctgtcaggcattgcatatctccagcatacgtttttgagaacattttgttctgaaaatttcctgttggcatttttctctgtgggtctctaggtttctgaataatgtgttcttatgtttacaaatcatgctgtactttagtcaaccatggtttatctttggaggataactagtacgttaacatttgccagattttttcttttaggctgggtaatcattgagctaactagattgcaaaatatgctactttaaaaaatgtaattagattttaatcatctctatattgtatgtgtggtttgtgtatctgctgctgctttttcaccattgatcacaaggggcagtcatctgattccagggaatagaagatggaggcttgctctggcgtgtgcgtgtgttgttaatgtatgcatggaactaatttcagcttgtagaaaatgaggccccatatgcttaacagatgctcttctctttttctccagggttccgctatggaagtgatatagttcctttctctaaagtggatgaggaacaaatgaaatataaatcggaggggaagtgcttctctgttttgggattttgtaaatcttctcaggtatgattgtgaacaaactaaatgagctttttcctagctgttatttgaaatggtatgcttttgattgg

SEQ ID NO: 13444 - DNA, 957 bp, Homo sapiens
ctacaggagagcccacactcatttacagcacgccacttggggctggctgttttctatttgagcttcagaataagtctgcaggacagtcagagtggggtcaatattccattttgcagtggtagaagttgcagctcagagaataaagtgacttgcctgaggacacacagttaaaaagtggaggagttggccagacatggtggcttacgcctctaattccagcactttgggaggctgaggtgggcagatcacctgaggtaaggaggtcaagaccagcctggccaacatggtgaaacacagtctctactaaaaatacaaaaatcagccaggcgtggtggcacacgcctatagttccagctacttgggaggctgaggcaggagaattgcttgaacccaggtgcggaggttgcagtgagcagagattgcatcagtgcactccagcccgggcaacagagcaagattcggtcaaaaaaaaaaaaaaaaagtggaagagtcaggggcagagctgtatgcaggcttctgagtcaaagtcagccacctctccattctgttccaagcattagggaggtatcctaggttaatggcagtcaccctgctccaggctttgttaccagagaaaaataaaaagatgctaagaaaaaaaaaaaaaattccaccccctgggtggcaatcctggagaggacagatttccctttttggactgtttcattgctgtaataacttaggagcagagaaaaaaatgttgccccgttgcctgttcaggcatgatcaaattgccacacttcctgtcaggaactcccgccctccttccagtggactctgcctcctcactcacggaaatgccttggcagagtctggggtccctggactgagccatcagctgggtcactgagacccatggcaaggaaacaaaataggaattccaaggaactgggcctagttcccctcacagatgacacc

SEQ ID NO: 13445 - DNA, 954 bp, Homo sapiens
ggcaacagaagcattatttggtcaagggatgaaatttacaggaaccccaagtaaatgtgcaaaagcctgcccctaatagagacctcacttaaccctaccactgtggtcaccgggctgctctgtgaggtcagaacacctcaggtgagactgtggagtaaccagatgccctggttttcctgggtttcaggggttttccaggacaaaggtcattctttgctaagcccagaatgatccccaggatagttaatcaccgtaagaaggcacagataaaaacttttttctgtgagctactacttacatttcaccaaattcaagactgacaaaaaaactacgttgtgtgaaagctcagttacatgtgcccatcatttttatttcttatgctagggcatgaagggaagctcaggagatcctgtttcatgaggctacagtctaaatctcatctaattctagtcagtctccaaaaagctgaacactctcctcttgtctccttgtaatcaattcattgtcatcagaaatgtgtgacacctcgaggggaggggaggacgtgtcttgaaaactgatcagagaaattgtcctgaaaatgatgctgtaaaatggaaatgagacctttagaaagagagatgctgaacatgagaaatcagtaagcctcaagacaaaaaccagaggaaatggagagagatgggaggcaggaagccggacctcgggggacgcagcaggtcagtgtcccaggaccagaggtggaaatggtcttccagcctttggtgggatgaaactgagcctcacagacccaggcccctttgggtgagtttattctccccagaattaaaagaggaggaagtctgcgagcttcagaagtccccctagggttcttgtaaaggcctccagtgcagtgctaatgctggtggtactagctatggaaagctgacatttggacaagggaccatcttgactgtc

SEQ ID NO: 13446 - DNA, 953 bp, Homo sapiens
ccttgtcatttcagctttggtctgctctaaacttatccatctctgtccattactggaacaactccgcaaagtccttattccctaaaacatcactgataccattaaagccactaacagagactgaactcagaataaaggaaatcatagagaaactagatcagcagatcccacccagacctttcacccatgtgaacaccaccaccagtgccacacacagcacagccaccatcctcaaccctcgagatacatactgcaggggagaccagctggacatcctactggaggtgagggaccacttgggacagaggaagcaatatggtggggatttcctgagggccaggatgtcctccccagcactgacggcaggtgcttcaggaaaggtgatggacttcaacaatggcacctacctggtcagcttcactctgttctgggagggccaggtctccctgtctctgctgctcatccaccccagtgaaggggcgtcggctctctggagggcaaggaaccaaggctatgataaaattattttcaaaggcaaatttgttaatggcacctctcatgtcttcactgaatgtggcctgaccctaaactcaaatgctgaactctgtgaatatctggatgacagagaccaagaagccttctattgtatgaagcctcaacacatgccctgtgaggctctgacctacatgaccacccggaatagagaggtatcttatcttacagacaaggaaaacagccttttccacaggtgagtatacttttcatgtatactgagaagtgtcccctgagaagtgccccagtcagagctacattgcccattgcaacattgagcatgactcagaggcctcctgtactcaaggtaagacatgtggtgtcttcttggggcctctactcaccactctaggccaaagtttgcattttcactatattgtcccattcagtcatgtgttttg

SEQ ID NO: 13447 - DNA, 953 bp, Homo sapiens
agcacatgggagaattgaatgatttacctaatgcatatgtgaatattcaatgaaagggaaatgggcatttggaaaggcaatggaggacaaggggacccatctctacggtcctgttgttaattgggaagagaaaaccaagggaccaggtaaatgaacaaaaaaaaaaactaaccttgagttggccattagtaccaatgctgtcttccacttcagggggccttcacttgcagaactacataaccaagagggagaaaggactcatgacatcctggactggttaaataagaacacagtgttcaccaccagaaaagcccatcacacacaacaaacacacccagatcgaagagggaaactagaatactgtcgactcctccccacatccgagaaaaaggtacgaccaatgcctagcagtttctagggaacacagctcaggaaatactgtagttctttaatgtataaatggcctccaaactcatgcaaggggagttatcccaggaatgaatactacacctatgccctccccttcacgtcttcccaggaaacttcatttatctatcttatctatctatctatctatctatctattatctatcatttatctatcttctatatatcatctatgtaatctatctatatgcgtgtgtgtgtgtgtataagacctcacgaagagattccatcacagacatcacagagtcggaaaaatgacgctttacccaaaacaaactcctacaggctcacggaaaaaaacgaacaaacaaacaaacaaaaaaaaacaaaaaaacacttctaccccgttcacacttatagttggtcacaacagtgctgtcacacgatcacgtcaccgtagaccagggtcacacgatagaccccgcccctactcaccgtcctgagtccgatcaaacagcacccacggcacacactagggtctccgtctctcacacacacacaccaca

SEQ ID NO: 13448 - DNA, 953 bp, Homo sapiens
ccacacctggtcttgtacctctctgttctatgcctgaacttccaccactgatcacttgccatcatcccagcaagtcacactgagcctgtgaaaccacagggcactggaaaccacacgttaggggaagtgggagagttggcggggctctcagatgaactccaaccccttgtttctcgcctggggaaagtgaggcccacaaaaatagagggacttggctcaagaacatgcagtgaatctgtggcagagccaggccctggccctctcttagggaggggtgcaaggggaaaggaaaaggaagactgggtcctggcccctggcttgctcacccaggctgcatctccccctgcaggtgatcgaggagttctacaaccagacatgggtccaccgctatggggagagcatcctgcccaccacgctcaccacgctctggtccctctcagtggccatcttttctgttgggggcatgattggctccttctctgtgggccttttcgttaaccgctttggccggtaagtaggagaggtcctggcactgcccttggagggcccatgccctcctgcccagggagtcccagatggggtgggaggtaggggagacttatctgcctgttccagggtattacctctgacccagcccctcggagcccaaggaatgtgggcactggcctgacctgtgaccccgtccccaggcggaattcaatgctgatgatgaacctgctggccttcgtgtccgccgtgctcatgggcttctcgaaactgggcaagtcctttgagatgctgatcctgggccgcttcatcatcggtgtgtactgcggcctgaccacaggcttcgtgcccatgtatgtgggtgaagtgtcacccacagcccttcgtggggccctgggcaccctgcaccagctgggcatcgtcgtcggcatcctcatcgcccaggtaagctggggcaggatctacct

SEQ ID NO: 13449 - DNA, 952 bp, Homo sapiens
ggagcacttttcacgtgctatcttccagaaatgaattcaatctgtaaataactgagatgtcttcacagctcttgggtaatttttgtctgtagcaataagaaactttatctctattaaagttaggaaggggttaggatccagtaatgaatgaaatgagaacttaagttgcaactcagtttctgtacttacttgtgatctagcattaaacacagtgccaggcacgaaataggtggtgagaaataagaaaatgatagagctatttgctctaatggttagaggcaatgatggtcagctttgagttactttggtgaccccgcagggaggaagagcacaggtggaacattagaatctctttcaggaaaaggatgccgctggatccatcaggtccagtagcactgcccatttctcctgctccaaggcatctgccctcgaaagcccccaggccacacccgaggacaccacccagggttctaggacacctcgagggcggacgtggtttggctctcggtccagctggaccgggctgggccaaccgggagtcagctcgaactcacctgcttggcaggtgcgcgcttcccgaggcgtgacaagggagcgccggcgcggtgggtggggggcagagaatgtgaagctccagacgcatggcacccgccgccaagtcgccgcggtggctgccgggatgcgccgcagcgaatggtcgcgccgggcgccgctctgagtgacctttcacccgcgcccagcggttccgggcggcagcacaaggcggtagccatggcggaggcggcggctgcagcgggtgggactggcttgggcgcgggcgcgagctacgggtctgcagcggaccgggaccgggacccggacccggaccgcgccgggcggaggctgcgggttctctctggccatctgctgggccggccccgggaggctctgagtaccaatgagtgcaaagcgc

SEQ ID NO: 13450 - DNA, 951 bp, Homo sapiens
ctttcatggaaggctaggtgctaggccctgcctgtgtttgaagctagccagacctgatgtttatgagttcaggtgatcgtaaatgccacctgtactccggcaaagtcggggctgctgtctgttgtctctggtggctcacctttgacctctagcccccttccccttaggctgccctgagatatacataagtagcttgcagggattctaggcccagtgtgccccacagtgggacaagtggaccagtgccctcagggctgtgggatggaggatcccagagggcctggggtgggcagtgtggagaagggtgcagagggtgtgctggggtgggcagagaagccagggtcaccttctccattcaaacagctgttttcccgaattggaagtcacccccaattccttccactcccacctcccacctcccacgtggaaagccccaagatggctttggggtttggggactatacggaacactttctgggcgccctgaccccgaatatttcaatctagaagggctgtttgtcctcacatgagggcctgggtcgagttgtaacacactggaacaggcgcggcaccgagggctccgagcgttggagcggagcggggatgcggggggcagcgggctgggtgccagggctgcgcggggcgcgaggcacggtgctgccgccccgccaggctgacagccgcgctcgggccaccgcggccgcgccccctccacccgaggccggggaggggacgggaggaggccgggcggggcggcactgctcccgcctgcgcttcccgccccggcccgggagggaccgtgtgaaaatgaggccggggctcggggggcgggcggggccgggccgggggtggcagcggcagcgggcagggcgtccgcgcacacctccccgcgccgccgccgccaccgcccgcactccgccgcctctgcccgcaaccgctgagccatccatg

SEQ ID NO: 13451 - DNA, 951 bp, Homo sapiens
gtggggaagtctttgtacgtgtctgccaccgtcatcttgcactcaggtgaggcccagtctgaaggccaggctcaggaccaccaagtgggccggtctgagaggggagaccaggtcagaagagaaagcctagtctaaggagggaggctcagagtgaaagtggggttcagtctgatggggtaggcccagtctgagaggggaggccgagtatgaagatggattccagcctgatggggggaggcagggccagtataaaggtggggtccgggctgatgggggcacaggcccagtatgaagtctgtgtccagtctgatgagggaggcagggccagtataaagatgggtccagtctgatgggggaggcagggccagtataaaggtggggtccggtctgatgggggtcacaggcccagtatgaagtctgtgccagtctgatggaggaggcaaggccagtataaaggtggagtccagtctgatggggggcacaggcccagtatgaaagtggactctactctgagggaggaggtctagtctgaagttggggtccattctgagggaggaggtctaatcctgaggggtggcccagaagcctacactcacagctggtcccctcaggcagtgacatggtgcaggcagagcgcagcgggatccccatcgtgacctctccctaccagatccacttcaccaagacacccaagtacttcaaaccaggaatgccctttgacctcatggtgagacccggggcgggaaggggtcccactcctcccttcggggacaccggccacagccctgagcctgcctgaacttcccccacctgcaccccacatcacaggtgttcgtgacgaaccctgatggctctccagcctaccgagtccccgtggcagtccagggcgaggacactgtgcagtctctaacccagggagatggcgtggccaaactcagcatcaacacacac

SEQ ID NO: 13452 - DNA, 949 bp, Homo sapiens
tgtcacaccataacttccatgcttttctcttttttgccttttattctgattgattgaatttactctccttgaaatttatcatgcatctattaatatacagtgactgaattaatactttaacttcttccagaataaaggagctaaaatacttcctcctattataccccttgtgatatatgagcattttaataatttttatttgaatattttagcaacataaataagactgcattatagcttgtatacattcattgtttggtaaaatttgtacacatggcaacttttatttctcagatatttattttagtatcttttatcttttccatattactgaagtatattcttaaaattcctttagtggggatacttatgtggttgtctctaatttcgttcataaaaagtatttttgtttttttcttttttaaaattagttttgctgggttcctgattatttattgataagtattatagaattttgaggatatgattttactcttttttatttcagttgatgttgttctatagtctgctgttggttccttgcatatgagttatctttttctctgtctagagttaagacaattttttttcctaaaatccctcctacattttgtttacaaaataactctaactggatttatttttaattataaggctctgagtacaatgtgttctctttatctgttgattcatgcctaccatcacgttgtaagcaaaggtgtgactgttatactgtccatttaactgaacttttaatagtatgaaatgcctcctttatctctatggcagagtctactgtgcctgatactattacagccacacaaagtttcttttggttgatgtttgtgtgatgtcatagatggaattttgctaccctccgtaataccacaatgaccttcaccccatagtgtctagtatagagctatgttacattgaatggcaaaagtga

SEQ ID NO: 13453 - DNA, 949 bp, Homo sapiens
atcattaaaatggtgggggtttcattcccattaaaaatttttccaaacattttcaatgacactctcttcacgctcataaaatctaattttaaaaacttttcagaagaaatcaaaataatttccctctaattctccttttgcccatcgctaggcgttctccccctcgtcatcccttccccctctggggtgtgagcgtaagtgtgtgtgtgtgtatgtgtgtgtgtgtgtgaccatagacgacccatactaatcaggtctcagagtaaatagcagcgcagggcgatctcaatgtaaattgcgcttgtcagaaacacacccccctccctcactttctctcctcctccccacaccatcccagtctgtaggtagctaagcgggggggggagaaagaaagcaaaagaggaggggggaggggctctccaaccaatggcgtgcaggaggcttggctaaccttagcctcccattttctctccccccgattcagggctctgaccagtcagtcgcctttgattatcagttgccagcagcccttctcttggctccttgacacgagctccatataaggcagcgatctccatagaaacgtgtcagtttcaatagtagtgtcaaagttcactatatacagacattcgcgcagatccccctttcggaaacattgctctgcgagtcctcccgtttaaacgcattcaatttttgggtctctctctctctctctctctctcttcttctcttctctctctctctctctctcctctctctctctcctctttctcccccctctctccctcctctcctctctctctcctctcttctctgaacctctcttctctttctcttttcttacatattctactagttgttttccccttcttcttctcctttctctcctttttctccctcctccttgtctcttttactccattcctgcagaagagagagggctaaactt

SEQ ID NO: 13454 - DNA, 949 bp, Homo sapiens
gagacccttgtctgattctgtgggcaataccagccaccggtcactgggtccccagtcccaggtcaacctggggagtgtcagtttggtgacaacaggagatgccatctgcccctcatctgctctgagccaggagcctcggccacctgtgtttgctccttatttggaaaagggggcgctgccctcccaccccagcctgaagggaaggtccacaagatgccatagtcccttgtaactgctcacccatcgggggagctatgtctgggagagggacggggagagggcggaagagttctgctggagccccattgttgaccgggagtttctgaaggccctgttccccggggtcagaggtcaaagacacatgggggagcaaaccggccccttggctcctgagtgtgagctctagtagcgtctggaaggcatgccgcgcggtccccggtcctccttgtatgtgtgcagggtggccctggcgggggtctcctggctggaggaccccccatgcattacccctggaacctgcccctttgagcaccccccaccccacaacacacacgcacacacacaaacgcacgcacacgcacatactgcacacacattgcacacacgcagacacactgcacacacacacacacacacacacacacacacacacacacacacgctgcacagaggaaagtgccgtgcctgggtgggttggggcgggctccagaggaaggagccgcttgactcagagctacaggaagagccggggcaggcggggtgagaaccaccaactgcccgtcctcccgcccgcctagggaaggggtgggtgcctgggtggggtttagggttaggagaggatgtgactgcaaggccaggaagctacagggaaagttctgatcaaaatacacaaagacacaagccaggtccccaccgcgcttggcgatgcatccatagcagccttggtgct

SEQ ID NO: 13455 - DNA, 947 bp, Homo sapiens
ttcctctgtgtcagaagggaaagagggtgccctttggggaagttctcttccagactcctagaagagaatctgatttaccttaaatgcacaaacaaggccttgccatgtcactggccaaccgcagacaaactacttcagtcacagaaataatttggacacttttgctttttaaggaaaagatgatttccctggatttttttcctgtgaggacgaggcattccaaaaccccagcggggtcaggcacagttcgccaactttatgttttggggggcagcgcatttgcttcccgaagtgagttgcgaaaccgttttctagcgcgcacggggctttcatctcttccgtgcatgcgaacggctttccgagatgccccctttatgggcttggccatcgctacttttgttacaaattaacgtctgggactcggactgctgccaataggaaactcccgcgattcgctgcctagttcgccgccctcacaagactggactctgcacaggccatccatgcccgctggtgcacctcgctctctcgcacgcttaacccgcggggacgcccccgacctcccacctcagccctcgccacagttagtcccgcccttccgcgcagactccgtggagtcctgtcacgctctccgcgcgctgcggcagccgggagattgtgaagggcacctccggcagccaattaacacccgcatactgggcgggaccacgcttgggcaggcggagggggtcgaccgaaggcggggacttttgagtgacaaggatgatggccaaccgtcggaggcccttctactgcgccccgcccctgagccggccgcccagcccccagtggggttcccggcgcggggaatgtcccgggtggagctggctgagtcgcgcgctctgctccacccgacggggctgtgtgtgctgggcctggctcgcggcgaaccgagatggcagagcagt

SEQ ID NO: 13456 - DNA, 946 bp, Homo sapiens
aatgtctctcactgtggctttccaagaaacctggaagccagagtttaaaataatatgatagtagctggtatgtatgcattaggcactgttccgagtgttttacatgttaattgactaatttttacaacaataatctcatatgtagtattatctccattttacagatgaagaaactaggcacagagaagttaactcgcttgcccatggtcacttggctatttgaagtggtagagtcaggattccaatccaggcagcctaagcacaggatccggtctctggagcactatactccaagctaggaagctaacctgctgggactacctttcccctcccagtatgttgggaagtgagcttcctgctctactctgattacaaaatcactacgtagctcagttagcctgtcagtccagtgcgtgggccggggggcgggggtggggggtagtgagcatggtctctccccaccttccacctgtgaccaaatggcaacgttttgttctgaggactttaaaggcagtggctttccaaggagcctgagagtgagaatcctgtgtcctgggtttggaaagggccctgttggccacttcactgcaggctgcaccctttctttcccagctattatcgctgaccctggatggactgactggtgtttcccaggaccacatgcgggctcattaccaaacaggctccaaccacatgatgctgaacatcaacctttggtcgacattgctgctgggaatgggtgagagccagttctgctgttcttcccatgtatcaccagagggcaggctgccctcatccttttgatccctctagctgttagttgcccagaccaagggcctgaattagttccaagatgcccttttgttcaagcccttgagaaaccttcctggaaaaacctgcaccagcaggatttgtttgctacttgttactggcacaatgaaggaga

SEQ ID NO: 13457 - DNA, 945 bp, Homo sapiens
tgcacaaggtagtcggtgtagaagaacagaggcgggcagtggacataggggaggtggcccagcctgaattcaagcatcgttggtgcaagccacgctctcaaggcgcatttcctaacttcctaaagaagtaacaacagcaactaacttttattgactgttgactatagacaaggcttcgttgttgccgctttacgtgcattaattcatttaatctgcaaaacaaccaaacatgaaacagcaggaaggaaattctacaaactccccttcttgctcaagttaagaaagtctcctcttctggtgcatttcagtaagactcaaatcctccccaccctgggaggcgcagaaagccaaacttcctccaaaaaaaaaaaggcaaaaaaaaaaaaaaaatcacttcagtccaggctgggggtatctggctccccgggaggcgcccgggctccccggggccctggcagacgccggcagcttttctgggcccgcactcggggacctcgcccgcccggcatcgcgattgtgcaagcgccgggcggcaaccacggccgccgctgccggctcctgcccgccgggggagggcggggaggcgcgttcgaagcacacccggtgaactccgggcttcgcatgacttcctgggggttatctccggggtggagtctgccgcccccaccccacctcccgcgcccagcgaacatagccccggtcaccccaggcccggacgccctcgctcacctcgctgactccatcctccttccaccccccctcccctgggtcccgcgtccctcggagtctggccagccgggggccactccgccctcctctgcgtgctcattggccacccagggcatgctctgtctccataaatgcatggtccctgggcataggaacatggagagggacaggaggaaacgcagcgccagcagcatctcatctaccctccttgacacc

SEQ ID NO: 13458 - DNA, 945 bp, Homo sapiens
ataatgtttcttccccaaatgccaagttagattttcatttgtctcagatggttttctttaggctagggaggaggtttttttgttcataactgtaacaaaagtttatttctgtactcttgtagagggtcagagcttgtgaccattaattttcaagggagaaatggtttcttcttttttttggggagataatattatctagtcacagggagaaacccagctgtgtcaaactgaagtcgatcttaaacattcctgccttaattaatctcttagttattgtagcctaagagccaactgagtagttttaatgaatttagctttgatttcttcagagactgaaggaatagcaaaagttttattgccaatagagaatttttaaaaataggacatttacattatataaacttctttgacagttgtacagcatttggaaaaataaaattatgattttggcattttccatgtttcaaaagaattttcaaagcattgtatagcattttcatttgtggaggactagggcagtcttatttatgtttttcccctgttttagaagacagccttttaacttctttgaggaaaggaagcaataggtcatgatcttagtcatagtctctaagatgtttttgacatgcacttcagggtccattctgatttgacctctgaccccttgtgtgactttgtgtgttactgtgtagactgttctgtaaattttgcattttgtttgaatttttagtttatttttgtttctattaacatgctttttgcaaatcaagaacttacattaaaatttagtctgtaaaatatgaatcacagttttgttctttgtcatagcagcctcacgtcaaagcattcgcagagtatctttggaggaagttctggaattactaggaacagggtttctacgtgggagttcaggattccttcgagccagtggagatatgctgaaag

SEQ ID NO: 13459 - DNA, 945 bp, Homo sapiens
gagaataaatgggagttttcttttgaaggaataataagattctggctatatttttggaagtagggccaaaaatacttattaatgaattagatatggggtatgagataaacagaggagtcaaggatatctccagacactggacgaggactattcctttcccagagactaagcgcagggctgagaaggaaggcaggctaccccaacaaggcgacattttagctcccatgtgctcatccttgccctacactctccccattatattctagagtagctcagcttatgctagacaatcatgctgtgtgagtacacatcatgggctgtacattacgggatgtcgtatgagctgtgtttaccagcagagatcacagctctacaagttgaagtgttctctctggtggtccccatgtgtacaggctatttgagcatctgaaggtggttagctcctgaggaaaaaaaactccactgtttagaggatgaatgaatctcccagagggaaggatccatcataaagtatttgctctctctgcctgtacttattggaacaactcgggaagtccacaaggacagtccaagtcatctttgtcgtctacttcctattgcattctcagccttgtttcctttttagaaagagcctgttaactatcataagtcaaaaaacagcattctgacctctgccctgtaacttcctcttcttcttataaatacaagggcagaactggcatcccgagaagccaggaagcagtgagcccaggagtcctcggccagccctgcctgcccaccaggaggatgaaggtctccgtggctgccctctcctgcctcatgcttgttactgcccttggatcccaggcccgggtcacaaaaggtgagtccagtgagctttctctcagatgaccaggttcatggtaactcaagctctgtggcagagacacattgccctcctgtaac

SEQ ID NO: 13460 - DNA, 945 bp, Homo sapiens
caaaacgttgaggaaagatccaccccagggaagggggagtggctgcagagaacaaacataagtaggatttaggtggctcagtgacgtcaggaggaagcagcgatggaagggatggggtgcaaactcacctggagaagcagaagctgcacacatgtcaaaggtcaaagggcatagcctcagggactccccaaacgcaggaaaagtgaaacgcccactcctgggctctcgccgtcaggggtacatctaagggctcagctgttcctacctttgacgccagggacaaaccctaccaggcacagttgggattggcagtaaggcaaggaaagcctgccccagatttcagagccagcgctggggaatctccctgtcctctccgccaccccctcccgcgcccgagacctgagacaccttctctctcacacccaccctctccaggccctctcgcgctgaacagcatcggtctctatggcgacctgaaaccgcagctcccattggcctgttcaatatgagggccgggccaatggggagggccagccctctccttcccgccaatggggtggcgggagctggcccggggacggcggcgtgctgacgttcccgggagcccggggctggccgggcgggagggctggcagcggggcgggcggcggcggcggcctctgggcagtagagggggctccggggctgagtccgcgtcgacgccggccgcggaggcggcaccatgggcaaggggtagaggggcaagttggccaccgccgccgccgggggtggtgggagagccgctccgggggcgggggccggtgggggagggaggggcgggcagccgcgccgccgcggcacttttttaattttttcgggtgccgcagcggcgacccctcggcgccgatgtccctgatccctggagcgacgacggccgctgcctaagctggaaagtaagtgtgtggg

SEQ ID NO: 13461 - DNA, 944 bp, Homo sapiens
agttggccttacatttcccatttactgtatgtgctgggagattggatcttaccaaaggaattcttaatggaattaattattaggtgtttgttttacgcatggctttatgttgcatggggcatgaaagccagtgcccatcctggcattataagagcaggagacctggcattttaagtggcccgcagtgaatgagctggactaggacagggagctgtgggaatgagactcactcctcttggcttttgctgacttatattctaaaagacttcgatggcctgaaagttggcaatcaggttttccaagatgaacctgctttttatgcagtgattttttttttttttttaaacagtgcagagttcaaatagctcaacagtattagcagtgaatatccttccttccgggtagttgtctctggctttgtcctggaatggccatacactattctagaatagtaggtggcatggtcaacaacaaagtgttctgttttttgtgcaaaaccattgttgctttcgttctgctgttctgaacatcaggagcatcattttcaatttattattattattatttttaggagtggaaacaaaatgtcagtcagtgtgcatgagaaccgcaagtccagggccagcagcggctccattaacatctatctgtttcacaagtcctcctacgctgacagcgtcctcactcacctgaatcttttacgccagcagcgtctcttcactgacgtccttctccatgccggaaataggaccttcccttgccaccgggcagtgctggctgcatgcagtcgctactttgaggccatgttcagtggtggcctgaaagagagccaggacagtgaggtcaactttgacaattccatccacccagaagtcttggagctgctgcttgactatgcgtactcctcccgggtcatcatcaatgaagaaaatgcagaatcgctc

SEQ ID NO: 13462 - DNA, 943 bp, Homo sapiens
tttgaaaaggctacaaacggtgtcattccaactatacaacattttggaaaaggccaaagcatggtgatgataaaaagatcggagatgtcagggactggggcaggagggatgagcaggcagagcacaggttttcttttcctctttttaagacagtgaaaatactcctaggatcctgcaaggagggatacaaattacatacatttgtcaaaacccacagcatgttgaccaccaggaggagaccccatgtgactccaggaccctggttgataacaacgtatcgagattcctcacatggaaccagtgcgctcctgtggtggagggtgtacctgtgtcagggcagggggtacgtggacattttctgcagtttttgatcaattttgcaatgaactaaatctgtggtataaaaataaagtctattaaaagaatccaaggctccctctcatctcacgataagataaagtccccatccattttactcctctcagccctggagaaaggagaggccaggtcccaccaccttccaccagcatggacccccagtccagaccccacgccttttctcagcatcctcagaccagcaggacttgcagcaatggggaattaggcacctgacttctccttcatctacctttggctgggggcctccagccttgaccttcgctctgagagtctcaggcaggtccagagccagttctcccatgacgtgatatgtttccagagcaggttcctgggtgagataaaaggatttgggctgaacagggtggagggagcattggaatggcactcagggcaaaggcagaggtgtgcgtggcagcgccctggctgtccctgcaaagggcacgggcactgggcactagagccgctcgggcccctaggacggtgctgccgtttgaagccatgccccagcatccaggcaacaggtggctgaggctgctgcagatct

SEQ ID NO: 13463 - DNA, 943 bp, Homo sapiens
caaatttccattgctgtttttccgcctaaaagctattttaggaccaggagcagtggctcacgcctgtaatcccagcactttgggaggccgaggaggattgcttgagcccaggagttcgaaaccagcttgggcaatataataagaccaagcctctacaaaaataaaaagtagaaacaaaattagccagatgtggtggcatgctcctgtagtcccagctacttgggggagctgaagagaatcgcttgagtccaggagttggaggttgcagtgagctgcgattgcgccactgcattccagcttgggcaacagagcaagaccctgcctgggagaaaaaaaaaaaaaaaaaaaagctattttagggacaatatgccgccacagtcacgaggtaaatatgccgccacagtcacgaggtagatcgtacaaaggttgctaacagtatggcaactgaccgctaacaagcgaatgtcaagttgtgaaatgcacaccacccacttccctagttcggtcgaagccctccccttaattatgtgcaattcaagtccccactgcccgcccgcaagcccccactcatcctcgctgcgggcagggtggcccctgcactttacaagggggtgcaggagcgggagacggtcgtccgaacaccggctccccggcatgcgtagaccggcgggcggagcgggctcactttgcgccaatcctacgagaactcccagaactccgcttccctagtccaacccaagccagagttgcccacacctaagatggcggcgggggcggagtcggcgcggccgcctctgggcgggaccgcggggactagacgtggccgcggggcggtgtcatcgcccccgccccgcccggtccagccagctcggcccgggggcttcgggctgtcgggccggcgctcccttctctgccaggtggcgagtacacctgctcacgtagg

SEQ ID NO: 13464 - DNA, 942 bp, Homo sapiens
tgatgtgaggacaacaaggaagagctggaatgtgagggtttaatcacaggctcctcaccctccgctgatgggtaggtgtgttagctccagcatggagcaccaccgcactaggtgggggaagggtgagagggcaatggggcagcctgtgagctggggcaacgtaggcagagaaggaactgtgtcaccacagaaacttctgccttcacccatcccttcagctctgcaggacaggtagagactccaggatcatccactgagcactggacataaggaaggctgcatggggaggactcaggacagtgacatcacaggatacccctcctattaggaaaatcaaggcccagaattcactcggctcttccccaggaggaccaagccctgaatcaggtgcagtgctgcctgccccactgtgccatgggccctgggctcctctgctgggtgctgctttgtctcctgggagcaggtgagtcctgggcacaggacagcagccccattctcagctttcccacccatgtcctccactttaccttggggaggacctccaggctttctgctgtgctcatcctccatctgcttttcccacaggctcagtggagactggagtcacccaaagtcccacacacctgatcaaaacgagaggacagcaagtgactctgagatgctcttctcagtctgggcacaacactgtgtcctggtaccaacaggccctgggtcaggggccccagtttatctttcagtattatagggaggaagagaatggcagaggaaacttccctcctagattctcaggtctccagttccctaattatagctctgagctgaatgtgaacgccttggagctggacgactcggccctgtatctctgtgccagcagcttggcacagcccggcagagtctctgacattctatacataaacttcctgccttagctttgacttgaga

SEQ ID NO: 13465 - DNA, 942 bp, Homo sapiens
atctggcagaaatcttcgctatgccccgctgatgtcctgggcccgatgtgggcgcctggccatggctcggtcactcctgacggtttttcagggcctcagacacctcttcttcttcttcttcttctttttttgagactgattttcgctcttgttgcccaggctggagtgcaatggtgtaatctcggctcaccacaacctccgcctcccggattcaagtgattctcctgcctcagcctcccgagtagctgggaccacaggcatgcaccaccatacccggctaactttgtatttttagtagagatggggtttctccatgttggtcaggctggtctcgaactctcgacttcaggcagacacctgttctttgccatgcctctgtctgaagagtatatggaaaggggttgcacaagcaatggttgctgttcctgttgctgccactgcggtgagggctgtggctggacgtccctcctggcactttgcctctgtcccctccatccgccgccagcatttttcctcccctccccttcctccagctcgtcccaagcctgcctgtccccagcgtggaggcgggacagtggaagactgggtgagtgaagcaggatggtgccttgggctccagcgtctccccaacccctccatgccatgggtccccacgcaggtgaggaccctggtggaggacggtgtgggcagagcgtgggacatgtcaccttccccacctgctcagagttcaagggtcctgggctgggccccgttctctcttctgccctggggagatcattcacgcttcctttaatccccgctgcagctgaggctggagtttggagtttgacccgcttggaggctctctcagcagcgggcatataggaggaagggtcactgctgtctccggaagctcttggctgcaaagagagaggatcccgggtatctccctccttacaacca

SEQ ID NO: 13466 - DNA, 941 bp, Homo sapiens
agtaacagaaccattcaggctgccatgttattaaggaatctgaactgttgatagcagttaccttgtgggtgatacaatgggaggcggcaaaaaaactacctgcataggagaccctgccctttgtcaagagctgggagcacatttcatcagagtagcaggcccacctggtgccagagggcctgcccctcctgcttctgttcctttgccttgcagtctcctggagagagcctctcttttcctgtacagcctttgggccaaaatgcccttctagcttctccaaagaagatccgagtttatttcattctatgttttaagaggtaaaaggacataacaagtgaaagaagttttgggctaaagtaggctatgtctccttatgtattactcaatactgttttgcagagaaaacatttttcaagcatgtgcttcctgaagacacctcagtctttgggccatttgatttccaatacatagggtggaagaatgtgattttggggctgaccataaactggaaatttgtgaaatggcagtgattgggcaatcttcagtttattttttcagttgaagtggaactcatttctggaatggatttaataggctgtgtctaatgtacaaactgggtgagtcctgccttagtgtgtcctgccccaccggtacgcttccaggatactcttttcccctctgtaaagtcactttcttctgatggccagtgtcactatgatgtcagtgaggtctggggatgaggacagtgtgtcctgaaattcacaggactgactcctcaccccagtgcacgaggattcctgtggcatcaggtgctgctgtacctggtgtaggagcctaatcattgaaccattgtgttactcacattccatgtcacagaacatatcagcctcaagaaggatttggtggaggtggatttaccactggttttacaaaggaccgtg

SEQ ID NO: 13467 - DNA, 941 bp, Homo sapiens
agctcccttttctctatgctgctcctctccccgccctgcctagcacagggccccacacacagcagcgcccaggaaataagcattggactgacctgactccaagcaggtagggtggaagatggaggatggaggaaggagctgggaggcccaaggggcttctgaggctgtctgccaagctgacctctgacctttaaagcccatgttttcccttctgccccctttccctgggaatattcgtccctattctcacactggctcctccccatctcagcttaaccctcacctcctcagagaggatttccccccacaccccacaccccacacccaccccacccccttttgtctcagaccccttgtccattccttcatagcaccttttactattggttattgttatgttaatttgctttatggtttgctctacccaatctccctgtaaggactgtggggacaaggactgatcatgtctgatttgatcccgtcggctccttgactcatgcattgcacacagtaggtgcccggtcagtgtctgctcagtcaaagctctccactgtggaggtgccacccccgccccggcaagcagacttgccctcaaacctctcttccaccccttccctgccactcagggtctcagctgccaccatcctaatagaagattgagccccttgcctgctggagccatctaagggagaagaaagccgttgtgagcctggcagggagggcggagggcagcagagcctctgagctggcagacaaagggcgtgtgttctcatccagcgcacttcctgggtttccgttgcaggaagtttggcacctgccgatcggtgacatcgacacccgagctgctgcgggccaggacgaatccctccatccgggagcagtggtggcggtggaacaggtggcctggggtgctggaggcaggtaagcagaggcagttgaac

SEQ ID NO: 13468 - DNA, 940 bp, Homo sapiens
gccctgtggatttcctagtgttattttccttatagtgatttcctaaggtcacagtttcctaacttctgattttgtagttttgatgtgaaagaacaaaagtgcttcgatttcaaacatattggagatagactcgacgccgggcgggccatgggcattcagcggaaaaccagacagacaaaaagattctgctctcccgaagcttacattgtggtgaatttaaaagttgtttctcaacattagcgctttacccatcagcagccctgcccagggcgaggcgcctcgatgcttgaagttcactgttcaggcgaaggagaacacagtgttcccaaggaccattgtaagctgggcggccaaaatttgaaagaacataaatcgcagggcaacgaaggaggcgggggtctctggaggttacttctattagcgtcaatacgggcgaaatcaggggacctagcaggagcctgaaaacttcaagccaaacaaacagtgagatcacacctcccacccgccacctccctccactgccgccgccgcgagacggctgccccgggggtggcccggggaaggcaggggggctcggagaagacggactctgctttcgctccccctttcttccccatccctaacatgggctttgccctggagcgcttcgcagaagccgtggacccggctctggagtgcaaactgtgcggccaggtgcttgaagagcccctgtgcacgccgtgcgggcacgtcttctgcgccagctgcctgttgccctgggcggtgcggaggcgccggtgcccgctgcagtgccagcccttggcgcccggcgagctgtaccgggtgctgccgctgcgcagcctcatccagaagctgcgagtccagtgcgactaccgcgcccgcggctgcggccactcggtcaggctgcacgagctggaggcgcacgtcgagcactgcgact

SEQ ID NO: 13469 - DNA, 940 bp, Homo sapiens
tgaacatgctccttgttttgagaatcaaatgagatgatatatatgtgtgataggctctgtaaattcataaaatactatataatctgagtaacttttgcattagccttgtttaaatccttctttatatgcctaaaactttttatcctaaaaccttagcccaggtccttgcacatagtaagtgtgggcagcaattattggatattccagcgaatgaaatgaaaacatattaatatttttactctcacggctcttatgtgctactaagatgacaagagacaataagcataataaattctttaatgatatagtatactagaaggtgataaatgctgtggaaaagaaaatcaaagtaggataagaggaactgagagtcctgagggtacaagatccaacttctaattgagaagagatttttaggaggtgagagtgtcctccatgtcagtattttggggaggataattttggacagggggaacaactagtacaaacaccctgaggtggagtgctgcctctcttgtctgagtaatatccaagaggccagtgtggctggagtggagttaggcaaagacaaaataaataaaaatgagatcagagaggtcacggagagggcacagcattgtaggccatgactgagtgaattgggggctaccacagaaatgtgaagagaagagtgatgtgatgtgactcacatttcaaaagaatcatccaggccatgcttttgacaatggacaaaggcggaagaggaggaaaggacagaggcagagagacaattaacaagctattatagaaaatcaggtggagatgatagtggcttgcatgatggtggtagagctggaggtgcagggcaaaggtcagattctgaatatattttgaaagtaaaggcaacaagatttcctgacagattgattatggtgtgtcaaagaaagagaggaatgcagga

SEQ ID NO: 13470 - DNA, 940 bp, Homo sapiens
gacctcaatgcagctttcctttacaggagggaggtggactgtacttgttagcgcgctgcaaatgattctcaggcatattaaacatttttctgtattctgttaaacattgtatgcgcagcaagaatgacgcctcatacagacctttcttgtcatttcgttttattatttcaaaatgtaagacaaatctgaaaaatggaggagcctgcagatacctgtggtggcgaggatttggggtctgtctgagctccggcgttcctgcccatccctccagctgtatctctggccacctgtctgttcctggcacaaacaaggcctgctggttgccaaggacatgactacggggccatttccatgtgagaaggccctggggggtgtcaaaatgcagaaacgtgactgatgggcagcggggcacccataaacttcccatagccaggtgcaggcatacctgcaaatgtaacgcccaactgtgtacaaagcagaaatctaaatgccagggcggactgggagaggttcccgtgacctctgacccggcctctaaattctcccattccctccccactgtcctgccgcgccccgtgtcgcctcgcctggcctcgcctggcctcgcctccctcctccgctgggggtctaagcctgcgcagtattgcgaacgcgggcggcgtttcccgcatgcgcagtcactgcccggcccggctttttcagtaggagccccgcgcggtgcgcgctcacgcacgcgcacggcctcgcctgcgcgctcacgaggcctctcgcggcacgcgcccccgccccgcgccgccccgccccgccccgcctcttccccctcccgcgcgcccgcccgccgcctgccgccgccgccgccgccgccggagctctgtagtatggcatcgaggagaatggagaccaaacctgtgataacctgtctcaaaaccctcctcatcat

SEQ ID NO: 13471 - DNA, 939 bp, Homo sapiens
gtacaacattcaagcaccacagcacatgcctaagggaagcattagaagagattagaaggaaaaggccgtggagacctcaatccctcctcctcccaccgcgggcctggcctccaccgccacctctgccaggcgggcatggaaggggcgacctctccgatgcgcactgccgggcgcgaagccgcccgcgcaccctcccccagcgcggcgcgtgccactggcccgggaggcccaggcgtgggcagccgggtacctagctcggccacggtagccgcgcagccggacagtaggaatttgctcgctcggggccatctctgggtcagcggcaaaagcctctcctcctcctccgggacggacattcagcagtagcgcaagacgataacgcactccttctcgccgctgcgctgcaccgcgccgcggcggccgcttccctgccagggcggccccttttcaaccggcgagtggccgggtgaggaccatttccctcgttcggctcggccgggtggacccgcaaccttcctagcagtcccagctggagtggtccagctgccccttacaccccagaatagaaaaacacagcggagcccaggaggttactgggcaatgtagtccgccgggctccgctacgtctctgattggccggccgcgggtccctctgcggctccgcccccggcctccatggcaacgcggctggttctcgcccgtcagtcctagcccggccctgcccctccttgcattttttccgcgctggctgagattcaaagagaagtggaggtgggagggagcgacaatggaaaaatcacctgaaaactgggacagaggaaggaagctacagttacgaaggagagctgcaaaagttgcagcagaaaggttgggagtcccgacaggttccgtagcccacagaaaagaagcaagggacggcaggactgtttcacacttttc

SEQ ID NO: 13472 - DNA, 938 bp, Homo sapiens
gactgacgttcctcctacgtgtgcccagccctggtgcaggcccaatagcctttccttcctgtactgactgtccattgagcactcactgtcctgtcctgtgttgtcacagggtcccgggaggagaagaggatataaagaacagagagtccctactcctcctgctgggtgctgtagacactcccgctcattcactctgtgacctcagatttctcatgatctattgttcaggcattccctaagcaccttctggtgcccaggggacacggtgaccaagacaagcaggaccctgcccttccggctcacagtccagcaggggagagagacttgtcctcagacagtgatgacccagagtaggaatggctgagggcccccgacccagcctggggatcagggagggcttcctgcaggaggagcagttaagtcaacaagataagaccgagggtgtatcctgctgcctagcatagctcctcctcagcatctcattcattcatcccttacaccgaccacttgtcccctgccccactctcagaaccttcccggtgccctccacaccctcgctccgcctccagcctcttgcccatccctggctcttcctcgtatctctttttgcctcctcccatctctcctctgccggctctacctctgcccatcccgaccccacagcctggccttcagaccgcttccggtccaagcccggctccaggcctctccacgcccccgcttctgcaccggcttccagctctttaaggagcggccgcggctcgcttccagcccctcgcctctgctgggcgcccctcgcctctccaggagcgctccgccctgcccgtactaggccccgcccaccccggcgggtctgcggctcacgcggctcccgggctcccttcccgcagcgctgatgcagcaggaggccgcgcagcgcgagagcgaggagctgcagc

SEQ ID NO: 13473 - DNA, 937 bp, Homo sapiens
tctgggatgatactagaggcagcgcagtatagactggggaacagcaccggcagggtctggacctcagcgctgccacagatgagtcatgtgtctttagacacgttccatgaactgtaaaataaggtgaataatagtacctgcctcatagggttgctgtgagaattgagacagtaaatgtaaagcaggttgtaagtgttacataagtgtatgctattattgtaattacttttctttcctttccagtcatactttgtatttcttttccttactgcactggctagaacctaaaggacagaggtcaagaaagctggcatccctgacctcctgatctgaaaagaaaagctttcagtcattcatcactaagcattttgtccactgtgtgtttgtcttaagattgcctttatcagattaaggaatgtccattttattcctagtttgccgagaatttttattgtcataggatgtttaatttggccacatctttttctgcatctgttgaagtaatcaaattattttatcttataatctcttaatatgatgaattacattgggttttataatgataaaccaaacagggtagtctgtatattgcattgtaaagtgagtgggtatcagtcgtgcagtgaccgtggtagcgtggagccagccggatgtgcactcaaataaaaaggtcagagcagagacggacggcggcctgagagggcagcagattcgcgctaacagagcaggtcaagcagggcctcctcgccttgctcttccgcttcagcatatacgtctccaagctcaggaaatgcagttacatcaaatgtctaaattggatggaaagaaattctgtgtgctcccaggattccagttccttaccggaggttggtgccgtctgagtctgaaaagctgccctcttgccgtgttcatgctttggtagaacaccttcagagcc

SEQ ID NO: 13474 - DNA, 937 bp, Homo sapiens
cttgctaattgttggccaagttccctagccaggtctgagttctaacacacgactgccgcctctactgtgtgtgctgtttggttgataagcacctatcaaagatgctgtagacaggattgctccgtggcctaaggtttggacaggatgacctattgcccttccccacacacggtcggggtatgaacatagctgagacttttcaagccttcgcaggtatcacagagcttggaaagcccagcacttgggggtagttagttgcaactagcaggcagccctagctgtttattacctgggactctcgggaaggcaagctcccggtgctggggaggacgtttgtcccaggcattcctctggcaaccctcttcctccaccagctcccaacaaagacatttaatccctttcttccactaccctccgctctacttggcttgcagttggaagctgaagtacaatttgacccaagccaccccctactgcgcacctgccatagcgcttgcgccccggagccgggcacggcgtcgcgggggtggggaggcggctcgtccccgagctgcgctccctcgcgtacagcctcggctctgggtgcgaagatcctctctgcctccgctcacccagccgcgccgccgcgcgggaacgcgccccagcggatgccctcttgagggagcgcgcacgcgccgcctctccccgcctccccggtgcgcgtcccgcccccttgagctgcgatacgccgagcgctcaacatccgaggactttggcccagagtaaccccgctctcgtgacctttcccctccattccgcacctccgagtgctggccgggcgagaggctggcggctgggctctcgcgcccctccctgcagggctcaggctctccccctcctgtcttctccgcgctgttcctcgtcatggcggccctcagcaagtccatccctcataact

SEQ ID NO: 13475 - DNA, 937 bp, Homo sapiens
tctgcagcagtagtttgcaacagttccattgtgggtcgtgggtttcaatgccaacaatccttgcattaagcccacagtgtctcaccgtccaccaaggagttggagccaaactcaggaaactggtctctattctgaaactacacacatcgaccctagtggggcaaccacctactggtggttgaggtttactcaaaacaagctgccctgtaaagggacagcagaggtcaggtagatggaaattaaagtccctccactgtgacctttcacctcccgaagtctctttgaatccccctctttctccttcctagcctctttttctcttgtccccacagccccgtggggcgtcgtgcacctacctctcccttccaccaggttctcaatccttccagctcctcttcaacccgtgctcattctcccacgaaaggcagcccaaactccagccccagtgccccagcccctttttctaccctgatttctgccggggtgaacctgccacagcggattagcgaggcggaacagaggggacaaccgctccgcccaaacaacgcacctctccttcgcaaagcgcccacacgaagtcaccgcgccccaggccgcgttctcctctcacccggcatcgagggcgcctccgctccaattcaggtggcggtgagcttggccccgccgctcggcgagtgtccaacaggcctttcctgtgcctaggggccgggtgggctcgactggctccaccgaagagaggacgcgctcggtcgcccagcaacgagccgcgcgccctcccccgccccgcctctccgcgcctctgccctgtaggagcccccagcaccgtggcgcccacctcaagtgcacccgccttgcgggacccgctccggggcagcctcggacttggaccccaaacccaggcctcacttctcccggcgctaaaaagacgctgctcccg

SEQ ID NO: 13476 - DNA, 936 bp, Homo sapiens
agttcttggtttcagggtccactgaggcttctaccaggttgctgcctcactcattaattcacacaagaaagttggggactcttggggatttgaagctgagaagctgctgtagtgcaaagggctggggttgactccttcaaggggtggctaaagaaatgtttagagttgtttagagtaggaagtgcttctcaggtcccatggccacgttctgcctagaagtcaaaggtcagcgggggtccacagcaggttgggtcctggggaaagcagccccctagtgacagttaaggctcagatgccaagtcccactccaggactgaaggctttcgggcaagcggcctagggtgtaggtttcccccatcccagtccctccctgcctgcgctcactgggcccgggaggacacccattgttcatcatgctctgcgcaccctgatgtctctagagagccattcattcaacagatacctgcagagcagggcctgcatatcgaaccttttccctagccctggcctcctcacacattttatgtgcacttgctgtgagcagtccacagtctttggcgtgcacaggggcacaggctgttccggaagccgccagtctccaaagttctggcgggagagaagggaggggagaggctgagtctcaagccgctagggagcggctctgccccagggccgagggtggagctttctgggtcggccgggaaagggctgggcttagcctacaagtgaaggcagggcagcgttggcgggcgctcccttgagaagtccaggtggcgggcacctccgagccgattcccaggatcccccaagtggctctgagctgccgatcaccggatgccccagattcctgggacccaatcccggatttcagaacctcaggaccttgcaagtccgagctaggatttctccctggactttagattcctggaacgggac

SEQ ID NO: 13477 - DNA, 935 bp, Homo sapiens
aaggtctgtgtgtgacaagagggacggtgggcagcggccctgggcaccgggccggcactgaacccccactccccacagctcgcggctcacggcgctcctggggcagccccggcccggccctgcccggcggccctatgccgggggtgccgctcaggtaagtcaccgcagccttggcaagggggtgtgggagcggcggtccgcttcggcgcccgccatcggcagggatctccctcttggtgccaggtacctgcctactgctcagtcgccgaaagtaggggaaagggcaagccagggtgccctagggcgaaactaggggaaaggtcaccgcttcgcgccgcctccccgcgcggctctcgcctgttctccccttgacacagcggaagtcccttccctgaacttgctaaccgtctcttttcccagctggctctggacaagtcagattcccacccctctgacgctctgaccaggaaaaaaccggccaaggcggtaggtagccccgaggccaggtggaccttagccagacccaaccagagccctgaaatttgcctctctctgcccaggaatctaagtcctttgctgtgggaatgttcaaaggccagctcaccacagatcaggtgttcccatacccgtccggtaagggaagggataatcagagctgggtggggccagggtggtttcccctgccagcctggcctgaccagcctgtcccccaccctctgcagtgctcaacgaagagcagacacagtttcttaaagagctggtggagcctgtgtcccgtttcttcgaggtaaggaatgactcggggcttggtccctggtgaggtgtttggagatgttaagctcaaaaggagcctggatgtgggatcctgtgccttccccaggaagtgaacgatcccgccaagaatgacgctctggagatggtggaggagaccactt

SEQ ID NO: 13478 - DNA, 933 bp, Homo sapiens
aaactgagtccacgtccacatttgagggtgggagggaacagagggaaactgagtccaggtccacatttgatggtggcttttaatgcactgcagggtgtgtccccttgaccttcacgaattttcaggtagtaagaaagcaatttttcttattggaaaggagaaaactaagtgactgtaaaataatataatttccttaaagcaaaacaacagagaaccaacttttccttttttcacattacccaataattctaagactcagggttttgtcacgttacagcaaatgccattcattgggggaagtcggaagtcagaacagtgtgtgctattcaaattctcgatgaataattaactcaaatgtgttcagagtgctataaaatgaaattaatttatttttagtttaacccaaaatccccaatcacttgccaaatgatcctctatgtatcctacataaaagacagggtctttctggcagaaaaccattgaagtttttatttgcagtaagagaagcatgccttattatcaaacaggtgcatggtccccttgtgggggggtgcccgtcacctgcgtccccgtgcgtcacggcgttgccgcacaccattaacacatcaaaacggaaaaggaaatgtaagcagtgtttgccgtccaaagttcacatcaacaattccttattaggaaggcaattctgagcctttcctcctgcatctgggagctgccagcaacccagttccaggagagaaaatagcttgacacctcctgcggcccatggagtcctcccgttgggacaaggaccccccaggagagagaagaccccagcagagtcaacactggaggtcctgcggggtgggtggtgctggggaggccacacggggagggctgttccctgttcccttcccctcaggagacagctggcccgaggtgacacagcactggatg

SEQ ID NO: 13479 - DNA, 932 bp, Homo sapiens
caggctatagcacttattttgagccttatcctttcttattgctacatattttactaagatgaactttctctaggctccacagcacaatgtgttcactctatccaagcacctatcataatatgctgtaattgatttttctgatgtttcttcctatgaaattgtgagctcctggagttgaggaaccatgtttcattatgtttatgtacctaacatatgagaaaaatgactatttctattctgaaagggcaaatatttattaaagaaactcactctattttaaagctgaaagtaataattttactcaattgtattacagtgaaactctggtacattttgagaaattctgtagttttaaatccccaaagacaatggtctaaatatagtactaaaaacctatctaattctttgaatggacattcataaaattggaaaaacaattggttaagaaatatatggcaaaataacctgagtaatcaaataaatacgactttaaatacaatttttagtttttttaaataaaatgggactatctagtgttggcaagagtgtagtcacatagccattcttattaatcttcaaagtgtagattgctaaaaagtcttttcaaaggcaattcagcagtaagtaccaaggcaattgaaatacaactgataccaacaatagaaatgggtttgttgtgattttcaaaaagtaattccgaagtatcacaactcttcctcttttccttcctttcccattccctcttcactttccctttcctctcttgtagatggcatcaccagaaaccaagaagatggtaaggcctggaggtggcagagctgaagaggtgagagaaggaagcctgatgaagaaatacaattctaatggtaaacctagggaatcaggaaatcaatttaactaagccagcttcagttatggcttctggacaatcc

SEQ ID NO: 13480 - DNA, 932 bp, Homo sapiens
aatacgaatttggggcaaaagattgcggacgacgtcagactttgagaaacttaactgtgaatctgcgtctgaggtaaatacatttcactgtttccgtttctgcagctcttcctaaggaatggaagcccagactgcctgggaggcaggagacctcgtttccagctcccggcccttactgccgctgcaaatcctagactggctagagaccattcgctgcagcggacgtcggaaaacgagacctcgcagttcaggaggcaggaaaaagacatgcccgcgccctcatcccaataggtgctcatagcgtttggccagcttgagctccattcggcccccacttacccaagggccccttccccgcggccttcgcttttagctcctcgagtttcttctgctcctctttttgtttctgcttgaaagccttatcttcctggggagaggcagagcgtgttcaactcaggcctgtctcccagcgcccccgcacccgccagtgcctccgcgcccgccctcacctcgtccatctccttggcctgcttcttgggctgtttcagtggcttcttcttgccacctgtgggcgacacgagcacgttcggcctgcccctgccgcccggtccccaccccgccgtccccgcagtcctcacggttccggaacacttaccttcgcggccggacatggcgcctgccgccgcttccccagaccctgccaccggaaacggagcgtctgccccaccctctgtcgtagacagcgaggcggccccgctgattggctcctagtcaggaagttgaactctcgctaccggatgcggcgctccaggggcgggtactaacaggtcagaggtcaactgagtggcagacgattggtcgggccacgccaggtacgaggagctagggttgtcctgccagggtagaatcggaaccgtaggaggggtacttaa

SEQ ID NO: 13481 - DNA, 931 bp, Homo sapiens
ttgagatttcccaattcatggactttgatttcctgttttgccattcactgtggcaggtcaagaaaagtttgcaactctttacagagcagagagagacagactatgctatatgaattaaacatgtttcagtttgttgtagtcttcgtgcacaaaaatttatctgaatctttttatatgttttgtagacctgggcaaaccactggcttattttgttcataagtattatgaaatcctgtatccactgtgaagagggtgggagcaacaaatttgttaaaaattcttcatttgtctgtcctaggagtttctccaaggcgtactatggattgcttagctttattaggaaaaaaaatcagctccagaatactctgctaacttagtctgaattagttaaatatacaactaactggcagttgtgtttattcatcagtagtgaaaagaaaatagatacagatttcttatacaaatttaactgctttgtttggttagttattgtttttactctttcttgttcctgcctccatcttggtctcatcatttctgaagaactagttccattttccttgtttaccgttttcccccttatccctgtagttgaaaggctaagtgaacaaacacagagtttattttattcccaaccaaccacggaacagtcatttccttgcagaataattggcttagggagaaagagacacagaaaacaaaacaagttcatcatgtacagcttggtctggctacaccccttttcagaaaccaggctgtgtaagagctgctggagtaggcacccatttaaagaaaaaatgaagaagcagcaataaagaagttgtaatcgttacctagacaaacagagaactggttttgacagtgtttctagagtgctttttattattttcctgacagtaagtaaagctctattttgttgtgctgtgccaaa

SEQ ID NO: 13482 - DNA, 931 bp, Homo sapiens
gaaggtcagggtttgatgaactccttggaaagggttctctagtatcttcccttctgctgcctctggagggccctgcatcaatactgggagagggacagggcaaggaaatagctcccggtgagatcccttcccccagtctcagtttcttcctctttacagtgggggtaacagtggacctgggggctgcaggctgtggagggggagtcaggaatgtgggtgggtgggtggctgtccttgtggccaagagattaggattgtgctggtttttttccagtgacacccagcaactctctgtcctctcaagaatgttctccagggagaacaagacttgactgattcttcagaagagtgctgcacccattttacaagcggacaagccaagtccttagaaggcatgggactagtccaaggatgggtggcaggtgatctgaagcctctaggctcctagccccaggtggcctgttccctcaatggagccactccagctctggcaagggcaggtgtggtggcgctgctggtgcctgctgtgggagtacagtgggcctttgtgccaggcgggcaccaccccctggctggcccctccccattcgcaggacagctcttacctgccgggccgccgccccagccaacagctcagccgggtgctccttcctgggctccacgcccggagctgcttcctgacggtgcagccgcaaggcatcgcaggggccccgcgctactgccctgctccctcaaagtcccaggtcccctcccctggtgctgatcattaaccaggaggccgtataaggagctagcggccctggcgagagggaaggacgcaacgctgccaccatggacagtagcacctggagccccaagaccaccgcggtcacccggcctgttgagacccacgagctcattcgcaatgcagccgatatctccatcatcgtta

SEQ ID NO: 13483 - DNA, 930 bp, Homo sapiens
cctgaatttttacggatcccttgaatattaattttcttggattaaagaaataaaagataaattttcacaaagagtatgttataaagtacaatgtggaaaatgtggacagcaagagttaaagcgcattgctaaggaagtgacgttcacgccacaatcgagggacaggaaatggcggtggcgttccgtccctctggagtccgccggtaaaattccaggctctgaggtttgggccaatcacgtgatcttaaaacttgaggcgtgctggagggtagccaatctatctggccgattgttaactacgtttgttttaaaacacctaacttaaacttgagctttccacagatttctttacatttagaagaactaactttataaaaccctactaggaggcaacagcgtttgaaggtcactctggagaccacaaactgggaagaacggggctgagaaaaactatcttgcggatatgggacaagagagggaggggtggaaaaatctggattttaccgccagggcctaccgagccagccccacaagcagtgtcgtaagcgggtgggagggaggagcatgaccccagaaggcccagtccaggagaaagatggaggttccggagtggagggggcagggtgcgcggaggcgagcagtgcggctgcgcgtgaggcggcggcgcgccggcgcgcgaggggcggggtgaaaggtcacagcgcggcagcgggtctggctggcggcagcggcgggagggagccgagagacccgagtgcacgtgtggagaagcggcggcacaagcgcggcggcgggagacactcccgcccccaccagactcaagccctcactcgactctcgcggccttcgttgctcgcacagctccctgcccaggctaggaggccggcttgcggggttgagtggcccgagctaagggtgcggagacctaag

SEQ ID NO: 13484 - DNA, 930 bp, Homo sapiens
ggaccactagttcaaatgccttggattgcaaacaccagagagtggcttaagcaaaccacatggttaagcaaaccctgttctggatcacatcattagcagctagacgtctagctatagctattaaatcctaaggtttacaatttgatttctatcccatacgaattagccagggtcttccctcccaaatctttcagtcaatctatagtaatttcaccacactgtgggtttggcaattatccaaataattgacaccaaaggcaagaaggggtgaacaacaggatgggcctcccggcatctcctgcagcagcacctggactggattctaaattcctccttccagaaagaagctgcatcccagcccagatccagctgagagccacagctgccaagaggcagtcggagctctgggcacctctctgtgcacccaggaagccccaggaggacttcatcaagccaagtcgatgcctcactcagagccccaggatccctgactcctaaccccacagtgacctggaaatgcctggtgatgccagaagcagcgctttccaattctgaaggccctcaaaatgcttgttcagcccaccttcctcctttcctggggcgtgggagtggtggggagatgagaggcagaaagatgaggacatcatcaggaggtttttccttactggaaaatgagaggaaatcctctttcactacttaaaaatcaaaaggggctgtccatattcctctggcaggggtctcccatcatcccccgcgaggcattcccattatcccctgcggagctttcccatcatccacagaggcccttcccataacccccaagtgggaagttcgcgcaagtgcggctctgcagggaggagggagggccgaggggaaggccctcgagagagtggagggcaacagtggccacggttcctctgtacttcgttt

SEQ ID NO: 13485 - DNA, 930 bp, Homo sapiens
tctgaggttagccagaatccatctgcagaacatgaggcagaagggagaaacacctaacaaggtgaggccttccttaactattttaacacaagcaattaaccatttatactcacttaaaagcagacagctgggatgatggtgtctgctaaaaaaaaaaagtgtaatgaaatgttctttagttttttgatctttagtaaaatttcatcttcgtataaaattttattaaccattccactaacttgttacttctccactccacctccccactccctttagaatccttagtttgaagacataattctttaaatgatctgtctcagggaggggggatcttgttacttttaaggactgcaaatagcattataaactttgtttttatttttaaatacgaatatcgactgaagctctcaaatcaatcaatattgttgccaaattttgtaaaacgcactgtcttagctctctaacgatagagttctaatataaatgtaaaaaccaacctatcaacatgttttcaaaaatactttttgtaaagaacagtacaattttgtggtgtccaaatattcctttctttcttacaaaatattattggatctgtccagttcataaatattcctgccctctcttcctccctccctgcctctctctccctgcagtttttttgatgtttgttcttttctttccattttctagttattaattggttcaatggatgacctttgtgcgacactgttataccttatcagcctcgccagggcccccgcgccgcccaatcccagcaactctggttctcctgtgaccccaagccttccagatccctgggtttccccccacgggactgtcacattcttccccgccggagacgccagtcgcggggcctcctccctggggtgtgagcaggtcggcgcgccacacttctctaggtggccggac

SEQ ID NO: 13486 - DNA, 929 bp, Homo sapiens
tggcctttgaggtgtttgttttatggtcttaaagaggtaatcagataataacattacgtaatatagttatactgcagtgtagtctgtaagagtctttgaggaagaacagagggtcatggaaattcagaacaaagagatatctctgggccgagggaatcaggagacggttaatgaggaagtgtgcttgaatgatacttggtgaggtttggcatggtagagaggagttcagagtttctctgtaaattctcataggcccctgttttttccctgttacgaacttttggactcactatcctgcattgaaactgcgtgtttgctcagcaaccgcggagcacactgtgggccctcagtaaatgtttaagtgaatgcatgaattcctggtagaagggctgtttctggaaatctttgtgctcagcacttatgaggagtgcatctaatacatccctaacttattttgttatcagagccttaaaagacagcgtatcagaccatgtggttgtatagttaaggttcagtgtttcaaataagagcagtcattgtgggcgcctcgtttttttttctagctactcgtgtcttctccggcagatggtctaacggctggatagaggcatatttttagtttgaatttcctgcgcttacagaatggttttatctaatttgtagctactggggttctttattctctggggccacctgaaggctttcaaacacagtaataagccctcctcgggctgggaaacaggaagctgtgttttaaatgccgtgatcactggattaaaggaaacatggctccactctgttctcttgccaggtggaattatttttttctttatgatggttccaaggtaaaggaagaaggcgatccaacaagagctggcatttgttacttttatccttcccaggtaagccacacagcattttattgttca

SEQ ID NO: 13487 - DNA, 929 bp, Homo sapiens
ccctagttaggaagtgagagggctctttccgtaagctcttacttagatcgtagtctctctctctctctcttttttttttttttttagacggagtctcacttgttctgtgcccaggctggagttcagtggcatgatctcagttcactgcaacctccgcctcccgagttcaagcagtcctcccacctcagcctcccaattagctgggattacaagtatgtgccatcatgcccagctaatttttgtatttttagtaaagacagggtttcaccatgttatccaagctggtctcgaactactgacctcaagtaacctgcctgcctcagcctcccaaagttctgggattacaggtgtgagccaccgtgcccagcccctagtctcttaaaaactttttttgggggagccttgtggaactgtcacacctcttcttttagtactgacatactgcgtgtgaaaaagcttgctctgtctgtctgcctgtctctctctctctctctctcttcccagcttgttcaggatctctgtacacagaaggctgcagatgtagccttaaactcatcaacagggaaaatctcgatgagtctaataagcagcagcttccaatgagtcacaaggttcccacccactggagtccctccccgtgtgccaccaaccagcacttttgtcatgctgggaaaacctcccacccaggcctttgccctgagtccagggtctgtgccctaaccccacagtcactgagagcaactggaggccacataaaacagacatctcttgttttccagatactacgggtcataatccctaactccaatcactggcaactcctgagatcagaggaaaaccagcaacagcgtgggagtttggggagaggcattccataccagattctgtggcctgcaggtgacatgctgcctaagagaagcaggtaggaa

SEQ ID NO: 13488 - DNA, 928 bp, Homo sapiens
atttctccagacctagccaatcccctctgccaactggtaacatgaggtactcttctccacgtgtggggaaagttcctctgaaatatggctctcgtcttctgcccctttcccagccagagatgggcagcggaggttctatggcacccatcctggcctcactctgaggttccaatgaggattctgggcatcaagagacagctctgggtcaaagcaaaatcaagtcagtccctgggcccagtgctgggctgctgggctttctgggagcacctgctgggcttgctacacactccacctcccagaaactccacacccacagccctgggtcttcctagccccaagactttcaagtccatatgcctggaatcccccgtcctgagacccttaaccctgcatcctccacaacagaagacccccagatgcacagccacacttccatctcaccctagtaaaacccagacctttggattcctctcccgtggaatgcccaaatccacaactttggggtgcattctcactcccagatcccaaatccaaagtccaggtgctcccctgtgcaaatattccaaactcctcagttccacagtttatctgttgcccgctcctaaatccacagccctgcagcaaccctcctgaagtaccagatttagtctggagttcccctccctgttcagcttccctggggtccctctcctcctcccttgctggctgtgtcctaagctgtgtgggattcagggttggggtgtagttgggaggtgaaatgaggtgattatataatcaaccaaagtccatccctctttttcaggcagtataaaggcaaaccaccccagccatcaccatctatcatcccactgccaccatgctggcctcagggctgcttctggtgaccttgctggcctgcctgactgtgatggtcttgatgtcagtctgg

SEQ ID NO: 13489 - DNA, 928 bp, Homo sapiens
atttctccagacctagccaatccctctgccaaccgctaactccaggtactcttctccaggtgtggggaaagttcccctgaaatatggccctggtcttccacccctttcccaaccagagatgggcagtggaggttccatggcacccatcctggcctcactctgaggttccaatgaggattctgggcatcaagagatagctctgggcaaaagcaaaatcaagtcagcccctgggcccattgctgggctgctgggctttctgggagcacctgctggcttgctacacactcctcctcccagaaactccacacccacagccctgggtcttcctagccccgagactttcaagtccatatgcctggagtcccccctcctgagacccttaaccctgcatcctccgcaacagaagacctccagatgcacagccacacttccatctcaccctaataaaacccagacctttggattcctctcccttggaatgcccaaatccacaactttggggtgcattctcactctcagaccccaaatccaaagcccaagtgctcccctatgcaaatattccaaactcttcagttctacagtttatcggttgccccctcctaaatccacagccctgcggcacccctcctgaagtaccacagatttagtctggaggccccctctctgttcagctgccctggggtccccttatcctcccttgctggctgtgtcccaagctaggtggcattcatggtggggcgtgtagttgggaggtgaaataaggtgattatgtaattagccaaagtccatccctctttttcaggcagtataaaggcaaaccaccccacccatcaccatctgtcatctcactaccaccatgctggcctcagggctgcttctggtggccttgctggcctgcctgactgtgatggtcttgatgtctgtctgg

SEQ ID NO: 13490 - DNA, 927 bp, Homo sapiens
gagaagaggcagttccctcaaatgccccccatgcgctttggctgcactctaccttacagcgcaagtctcgtggcctcagcctggatgtctccccgttggcgaactcctatttatcctcaaagccccaacggcaatgccacctcctgccgcgggagccgtccccacgcctctcactctccccagcgccttcaaagctgtggacccacacgctcccatttcagcttcacctccagcctgaagagtttatttcaactcttcttccagagtgggaaacgggttttcctcaaaatcagggtagccactataatcggagactctagaatgttggccccctccccctcctgccatcctctgcagaagccgaggagcgttcgtggaatgaatgaatgaacgaatgatctagtggaacccctactttacagacggacgagtgtagtcccagagtctggactaaactagagggagcctggccagccccggggacagcggggacagagggaactcctgcaattcggagctgcggtattgcagccggttatacaacgtggggaggcagcctggctccccaaagacagcgcagcctcgttcccggagggcggcctgcctgggacctgccgggcactccgccaccctacggtgatgcagcaagagccgcgcggtccctttaagaaacccggctaggcgaggcccttctgtgatcccgtctcctcccttggcccgcgcagctccgacggagcaggccagtgagtgacgggcaggtcgcccaatagcagcgtgcagaggcaggggcgtgccccggcgctgctacctgcgcgggcaagctcagcgcacttggcttaaggggcggcgcgctccctgcctgctgctgggcggagggaaggcggcaagagctgcggagcccctggaaggtgagaaggactcggagag

SEQ ID NO: 13491 - DNA, 926 bp, Homo sapiens
cggagaaattgttctgctctgttacaaaatctgtccccgttccctcttccacacatgtaagcagcaagcacttactgtcagattttgaccctggggaagtcattcatttccactcgaaccagctgtttcaaataacttgtgcatgttgcatttaccaacagaaaattatacctttttttctttgattcactgagggatttttgtttggaaaacatttactagtatctttcagctgctatgctagatttcgcagcaagcttctcattttaaaagaggaacccccacaatgtcccaaccttcaaggtctcttgtggtgtcccgcgaaggggaacatgaagggaggtggaaggggaacaaagtgttctcctggaattagtactcgccaggggctgcttcagagtacaactattaaaaggaagcttgtagagtggggaaacaccagaagaatggagcaataagaataaggttcaaaccttggattcaaaatgttgagttattgaacctttacattgcaccttcataaaatgagaataaagatacgactctataaggtatgtagtatattgtttctaatacacaagaggtgctccaaaattgtagctactaatttaactattttttgaaaaaaagttctgccctttttaagaaggcaaaagtaaaacttaacacatcaccagagatatcattaggacaatatgggatattgtttccatggaggttatagaattgcaccaataaagacagcattatttcacataccacattctcttacaaaatctaacttgtaacagataatttacatttctagagaacaagctctttatggtacatagaaataatcctgtcatacagtgaccattcagtaagtatgcatttaataataaaatgcatagattagtgatacagaccattatgatgacaaacga

SEQ ID NO: 13492 - DNA, 926 bp, Homo sapiens
atacataggtctccagtgcccaagaataaccctaaatctggattaatgtgttggacccatttctttctctttccctctccctcttttcccaggttttcttttaattatctaataagccccagaacttggctctgtgtgggtccaaagggacaggatttagactgaaagtttagcctcagtttgcttctttataactctgcatttttttctgaagctaacacttttatctaaagagccgcattgcaggagatgtactaggttcccaggttcctctaggctgggcatccatacgaggcattccagaatgttcagaggatgccctgagtgccaggccttagggagaataaagacataggaaaaatggtctcatacaactaattagagtcctcacagagcacacacgaaccttttgagcaagggtttgttgactgaataaaacacaaacaaaaacagacattgaaagaaggacattgtgtgctcagattctaagtgatgttgggacttgagctgagtcctaaagaaaactggaactcgagtccacaaagaagcgcagcataagtgaaggtcacaggataggaaggtgttgcatgaggtgtgtgtgtgtcggcttaactgtgtcacttaatatctaacattgacgttctgtgtcatcaaatcctgccccagccactgctgagaccctggtcagtgctggtcagtgctgctggaatgatagcatggaacctgggcttttgtctctccctccgcccctccaggctcctagaacattgccggaaacacaaatacctctccagctctggggaggtcttcgccctcctggtcagcagcctcttagagaacctgctggactatagaaccatcatcatgcaagatgagagcaaggagaaccgtatgagctgcactgtgaacgtgctggtatgtgacat

SEQ ID NO: 13493 - DNA, 925 bp, Homo sapiens
cttgaagacatagtggctgggacaggcaagggccaagaggaattggctgagaaaggggcagagcaggggaaagccccaagtgtgttctggggacctacatttgaaggctttgggggcaagggagagaatgtgcaggtgcatgagatgcccagggcatgtctgcgagccctgtgcatgccctggcacacaggtccctccaggatatggcatgtgcctgtcttgaaggcctgtatctggctaggtgactacagtcggagcaggctgagcactgggttccagtttaactctggagctactgcaggctctcccaaagctgctgccattttcccttctttattagtgtcctaactcagagaaagtgtgaatggggagacaggaggatgttccaatgtcccaaggctcctgcgtttttgaaagcctttgcacctcgtttggggattcctggagggaggcctgcgctcattcatgggctggaactgagggaaattgttgggggactggtatcgtgtgtgaagacagactgacacctttacaatccctccactttcccccacccccaacacccttgcctaatctgtcttccagggacttgtccccacggagtgactccagctctcctttcctcactgcctccaagtcggccctttgccatcaacccccagtcctgagttcacccctgcacctcctccggcccccgcgccgcaagcgctgctctctcctttgccgtcctcgccccccgcgggctgccgggcggcgcgggccctttaagaacggcgggaccggcgagcagtagctggtaggagagcgcagtcgccccgcgggctcggaggacacagcgtccgggaccaggctctgggaagcgggtgtgcacagcccagcagagtcagggcgcgaccccaaccgcctctcaccatccttgccgtct

SEQ ID NO: 13494 - DNA, 925 bp, Homo sapiens
ttagtgaggacccagtggtgtttttgaacaggcggcaggataacaatggtatataaaataaatgcagagaaagacctccacatcaagccaacccctcctccctacctgtaagttttccacctgagtgagctctggctccagctgcacttgtcaaactcccattgttagagcacagataaatgcttccggccacccaagcaggagaggcccacctcaacttaagggctactctattttagttttccgtagctggagattgagtatcacgcttttctaatcttgtgcttctgaaagggccctgttctctcttgaaccccaccccctcctcctttcacagatcaaataccaagtacattggacagatagaagttcgaatgagaaaatgcattttaataaaatcccattgatttttgtggatgtaagtcaaggaacaggcacctaaagagtcttccatcccctgccgtctcccgcctctctcctgacctacaccgggcggtcatacatcgattggcttcctagataatagatcgtgccacccggtagggacctctggggacgcgccgggagctggaagagtcgcacgcagcagcccaaccctgagttaatcaaactagcaacaggatctcaagcagcagcgacggcggtggcaagagtagcggtgacggcggcggcggcggcggcggcagcattatgcgtgattactgacaggcaccagctgctgccgccacagccgtctcaaacgcactatgtggactctccgatctagaggcagattcctgactaatcccagagggctggcccagcctgtgctccccgggctgctaggaagcgatgaccactcttgttagcccaagttgaagaaagccgggctgtgcctgggagccgagagaggcggtaatatttagaagctgcacaggagaggaac

SEQ ID NO: 13495 - DNA, 924 bp, Homo sapiens
ccacctgacatttgataaacacgacttaagttttcttggtccctgttgtccgcatccatgttttacactcgtggatttctgttttcttctcggggtggggcaatgcctcccctggtgcggccctcaaaggcccaggagcgcagatcccgccgcagaaagacccctcgcccatctgcgcccagcccttccccgcaggagggctcaggggaccccacgctactggaatccaccccgagtcacagctacagatcattacccacaagtggggtcaaaggcctctttacgggcgagaaagctgcggctcagcagaaagccaagcactttgggagggaggagctgaggtgccttattactccgaacagacgcgaaaacaagccagggcccgcgcgggtagacctggtaggcgggtgggcggggcgagggccacttccggggtgtggaaccctgtcgagccccgccccgagccccgccccgagccccgccccgggccctgtggtcccgggatgagctctccgcgcagccaggctcgctccagtgcccgcccagcgctgacttcattggctgcctccccagtcccgcccccaggggggccctgctgatgttcgtagccaatccgcaggcgcggtggcagctgcgggtcgcgggtcgcgggtcgcgagtcgccggtcgccggtcgcggcggagcctgggcgctgaggtaccggggcctggacgagggggccgcggtctggctagggagccgcgcgggctcatggcggtacggcgacctggcctcgctcgagggttcgcgggcgggccgcccctccccgggctcctagggggacgctccagctggaggggcggtgaccgcgactgtcgtgggctggccccaggtggctagggttgggggtcagaggtcagaggttctgccctctggaatgttag

SEQ ID NO: 13496 - DNA, 924 bp, Homo sapiens
tacgatagactccaggcaaccatgtgcatctgtgcaagatgacctctgccccaagagaagggttacggtctaattaaatgtttaccaagatggtaccagtgggctctccccgtgtcctttggtgttattggagctggtgtatgacagactcaaggaaattttttaaggaaaatgaagaagaaatcaacctttatggttctctttcattggaagaggagaataaggaaagaaatggcaggtagagagggagggggaaaggaatagaaatggcatgtctttgatgctgtggcttgtgtggggacaatgggaagagcacagcaggcacaacatatctgtgttagtgccacgtggtatctgttaagtatggccagagcctcacatataagtgaagagagttaagacaattcttgctctttgaacaataatagtctatagaatttctattggcaaaccatcccagacaacctgacctatcaaacaaaagcaaataatccctgtctcagaactgctggtctaaaagctagaaggggcatgataatggaaattgctagaaaagagagaatgctctactctctttcctgtgcctacctacccccatcctaaaccctgtaaaacagaatttcaaaatagatgtcaaatatgaagtaattcagacttccaaagaaggaaagagttctgcccagggcagtatgagcaaatccacagggatgttaagatttggtccaactcaaaggtttatgggcagtgagcctagagtctcttgagagtaaacccttgcatttgggacaaggagaatatgtgaagttcaggagtgctcacactagagcaagatccagaaaaaaaaaaatccaatggcattttaaactagattgcattatcactcaatgctgttactttgagcagacaaatcagttgaatgggagg

SEQ ID NO: 13497 - DNA, 924 bp, Homo sapiens
tctgacagggtctcaagccttacactaaatgagtcaaatacaaatggcagtattctgtgcacatgagagagggtagaggcgctacagggatttcttcaggtcgaagaagcatattttccctccttctcgctatattaacatttctgatatagaaatgtgccttctaattaatgaggtcattgaatgtactggggttttttttttttcacctgaaaagttatgaattgctgctgtgctttacaatctgcatgaactttgcatggagtgagtctttatggaattaagaagagcgtttgaggacaacgaatgctaccaaagggagaaaagggtaaatatgtagaaaataactgaaaattaaattactgaattgatgctgtgccttataatcaacaaaatgttgaaagcaaggaatactttcctaagaggcataaaggtttcttcatatcccaggtattaaccaatctgctccctaccacttcaaaattcaagactaattggagtcatgcagataatactgttactacacaaagtttaattaaaaccatcagtactcattaactcttttgttataggtttctagtatgtacctttagaaagttattgatgataatgttttgaaccattcttaacctgacttatacaaggggattacatgttttatagattgaatattaaccattaggtagtgtaaatattaaactataaaggagtcaagtttctgaaagctaaaaaagttctgattttctgctgagatcacaacaaaaacctcatatataattggaatacttcatgatacaaataattaaaagcccaggttaaggtaaatatattaaagaccaagatttgcagtaacatttatcatatcaaatctccaaatctagtggaggaatttaaacagaggacacagacagctcttgggagagt

SEQ ID NO: 13498 - DNA, 923 bp, Homo sapiens
tgggaggtctggacaactctaagaagcaaaagggaaatgctgcagggaacaaaatcagtcagcttccttcccaggacagacatttcagtctggcaaccttcaacagaagaatccccacagaacacagtgtccttgaatctcatgagagtgaaggaagtttcagtatgaattcaaatgatattacacaacagagcgttgacactagggaaaagctctatgagtgctttgactgtgggaaggccttttgccagagctcaaagctgattagacatcagagaattcatactggagagagaccttatgcatgtaaagaatgtggcaaagccttcagtttgagctcagaccttgttagacatcagagaattcatagtggtgaaaaaccctatgaatgttgtgaatgtggaaaagccttcaggggcagttcagagctcatcaggcatcggagaatccacactggagagaagccttatgaatgtggagaatgtgggaaggccttcagccggagctcagcccttattcagcataagaaaattcacactggagataaaagctatgaatgtattgcatgtggtaaggcttttggtaggagttctatccttattgaacatcaaagaattcacactggagagaaaccttatgaatgtaatgaatgtggaaaatccttcaatcagagctcagccctcacccagcaccagagaattcacactggagagaagccttatgaatgtagtgaatgtagaaaaacatttaggcataggtcaggccttatgcagcatcagagaacacacaccagagtttaactctgtgggtaagagttgtacaattgtgaaatgcaaggagttcactgtaggggtgagactccacagaaaagaaaagtttcctgagagcagaacttctgtccttccctcccagttcggtactat

SEQ ID NO: 13499 - DNA, 923 bp, Homo sapiens
agcatttcagatcagagtgacccgaactcaataggattacgacaaaaactagtgagattcagataacaccgttacatcgaaagttttaatccgtgacagaggaaatattgcttacgcccttaggtaatttcaaatgcacgtatgaaggccgtgcgggtttctgcaggcgaagcaaaagaaaggtggggccggcagggtcgtggggcgggggtggggcatgacaccgtatcccagacgcaactcgacctcgtttgcaagaaattctgtatccaactctcttcagtgcgtttcgccgcccctagtctagtctggctagcccccaattcctttaaaaggggttaaaacgggtgttgcagaagagagaacactcaggtagaaagggcctgcggcagaggcgcccccaaatcatggaacctgttggaagagtgaggaaggaactctgggaccccgaacattctcacgggtgtaaaaagacaaagtaaatccccattagccaagttggggagaagtcacatccgttacacagcctctcccagaccgccctctaggaaggacaccacatttaaaaacaccggcctgcctccagtccttggctgcctcacagcgatgctcagagccggtttcccaaggtccgcgcgccgcctgcaaggcgcaaacccaagccgctgctggttgctaggagatactgggccagccatctcctccaatcagcacgcacctctttgcgtccaatcacagaggcaggaagggccgtggtgggaggtgaaaggtcatagtcctgtttggcggccatttctcttgaaactgcggctcgggacctgcggtacctgctgtagtcacgagggacgggcggcggcctggtcggcagagagtagcctgcaacattcggccgtggttacgatggtaaggagaaagagaacggc

SEQ ID NO: 13500 - DNA, 922 bp, Homo sapiens
agctgttagtgatggagactggcgccgtctgggtcatcagtgctccggaatcaggctgctcacgggtttgaatctcacttccactttcactccttattaactgtgtgacctcgggcaagtcacttcgcctttctgaacctcagtttccccatctgtaaaaggtaggtgaataacagtattcacctccttctgtgtgactcagctttggagtcagcggaccgggttcaaatcccagccctgcaagtgattagccaggtgaccctgggcagagggaatcactcaacctctctgcacctgggtttcttccttcatgaacgtggagactttacaggatgaaatgagggcacagttaaggcgcccggtacactccaggcaggtagggggctccgttcacgttattttcccctggtgacggatactgtccttaaacagcatttgaaaagtggtcgcagggtgtgtggccccaaagatcccaggcgcttccggaaggcgagccaacgctccccaggcccgtccgcgagcgggtgggcctaagccttggaggatctggggtgggggtggcgcggggtccaggcccggggcgccgagaggtggctggtccggctgcccacgccgagacgcgcgaggtgagcgggcgccggggcggggcggggtggggcggggccgccgcatccccgtgacgcgcgggccaaccaggcggcgttgcggccccggccccggctccctgcgccgccgccgccgccgccgccagcgctagcgccagcagccgggcccgatcacccgccgcccggtgcccgccgccgcccgcgccagcaaccgggcccgatcacccgccgcccggtgcccgccgccgcccgcgccaccggcatggcgctccggggcttctgcagcgccgatggctccgacccgctctgggtacgtg

SEQ ID NO: 13501 - DNA, 922 bp, Homo sapiens
aaaaattacccttccccactgtcccctctacaccccctctctatgctcttttcttcctagtaaagcattactttctttctagctcagtgatgccactggatgtgatgtcttctatctccttttgtgttgtcatctttattagagtcaactccttgagggcgaagacttaataaatacatacatttttaaaatacaaaataatatttcagttatatttctaaaaggtctatcatttaaagattaatattgaattaatattgaattaaatcccaaatatttttgggatttaaaaaaatttaacattgataagggaaccgggtggaaatatacaagaaataagactggccataaggtaatcatcatggaaacaggtaataggtatatacaggcccattgtgttctgctcctctacatgtttgaaattgcacacagaaggaaaaataattacaggaaaaatgttaatatttctgttaaggcatttgcaatacagtgcttgtgatctccaacatctctgctggaagaaagtcaggctggaaagaggaaagcactcacagcatgttgataaacagcctagcatgcagaacctttgctgaagacagtgactaacttcaacttcatgaactgagaatgctcttactgtgctgaaatctcgagtcaaagctggaggcaggaacattttccctgactaaaggaagtgaaaaatgccatctcagcatttcataacttttctgatccaggtgtgatctcactatttgtaaagcccagcccttcccaacctgcaagctcaccttccaggactgggcccagcccatgctctctcataatatataagctactgctggagcccgattccttgtcctgcttctcctgcctctcgcctccagcctccaacgctcgccacagccctctcatctcctggaac

SEQ ID NO: 13502 - DNA, 922 bp, Homo sapiens
tcactgtaacaatattatcccctcgtaattattatattcctaagttttaggcacttttacatcctgctcgctgcccccagctctcttaacacagcatccaggacatagtgggcgcttataaatactgatggcattaaactgagcgcttatgatagcatatttagagcagtgcttttcaaacgtctaggtgcatgtgaatccctggggacaccgttaaaatgcagattcagagttagaaagtctggttggagcctgagattgggcatttccaccgagttcccatatgatgcttgtctatgttctgtatttttcaaggtctcagaaaatgagacctccctatccatatacaaatataagtcacacaaactgtgataatttaatgaaagtttacaaagagcatagaagtagatgtttcctcttttcccctgccctcccaataaagggaacaaattagatgcgagggttcaatggaaagagttgcaacagcatccaggcgctcgctctcctccggtcttcctgagacagggaaaggggtaatgagaggaaggaggaaagtgtccaggagctcccacgctgctgttcttccatttccagcttttaaagagcacccgccccttcgaaccaccgaggtcatgggcgaacacaccggagcgcagcaccgcgcccccccgcacacaccgcccgcctccgcgcccttgcccagaccgaggcggccgacgcgcctgcgtgcgcgctaggtataaataggtcccaggaggcagccactgggcagaactgggctacgggcgccgcgggccatggcgggcgagaaccaccagtggcagggcagcatcctctacaacatgcttatgagcgcgaagcaaacgcgcgcggctcctgaggctccagagacgcggctggtggatcagtgctggggctgttc

SEQ ID NO: 13503 - DNA, 921 bp, Homo sapiens
ccaaatactcagcaacaaaggctccgtttaaaagcgtgtgtggcacgtccatccaacagagcagggcgtgattccgtcctcttcccgaaaaggcccaaagggagaggtggaactgctgtgggattttttgaggacggtcttcccgggaattttccatttctgcttttcttatttttcaatgttatcttactacctgggttacgtgtcacgagctcaggttatttctaccaccagagcctggggtggaggatacagacctcgcccactggagctgcccacagcgcctcgccggcccctcctgcctccttcgtcccgcacatccgctgctgccctgacacaccccgattccctggtgccagggagagccagggcagaggtggccctgagacgccacgcgacggggagggctagagcgtaaggaggagcgaggtgcgcattcgctgtgaccctggcgctcggcttcgcctctctgggcctcggtttccaccccgcgggagcgagtacgacaggggctgcgcgcattgccgcagtcacgcctgcaagagccgggccgggtgagccgcttccggcgctccgcgggggccccggacgatccagcaggggctccgccctgggacccccatcctgtcttggggcgtgaccttcgggggcgcacgcggtgccggccgcgcccggggaagccgggtccgcatccgagcatcaggacagcctgcggccgccccattggccggcgtgtctctgcagggccgtcccacagccaatagcggccaaggggcggagcctggccggtgccctcggagctgctggccccgggcggctgctccagtctgagcgccctccgctcgccccgagagagacccggccatgcaggagccgctgctgggagccgagggcccggactacgacaccttccccgagaag

SEQ ID NO: 13504 - DNA, 920 bp, Homo sapiens
gctgtagtacaatcagatggggcttgtcctgggacatctgcccccagagagacctgtgctgaaagccagctttcccctacgttttatcagctacctcagctcaacacttgaatccttagaagcttcagagtaaaaagtactcagaattaggttggggcatcaggaataaaggcattagaaagaaggttctctaaggttctccacccatacatctcgtaaagccagtgtcccaggattctgatctgatacactccagtccttccatgttatggggctgcacttccttcccagcacaggcatgacttctctgctcatttttagaggggtgtccacagcaccgtgttaaataactgatcccagctataaagacttaattccaagaacctgtttaatctcttgtgatctgaggccttgggaaggaaggaagagctgaaggcacattctgagcacctactgcatgcagacacagtgctaaatgatccacatgtgtgatcttatttttaaatagactttatttttagagcagttttaggtatacagcaaaattgagctgaaggtacagaggtttcccatatacctcctgccccctcatacaagcacagcctccccccatcaacatcccccaccagagggatatgtttgtgatagtcaatgaacctacatagacacactgatcttatttaggccttagttccagctcccctagaagagtgacagttgccttgtggcctgaccctcctgcctggttttgctgcttggtacaaaggcctttagaaattccctggcgtggttgattggctaacaaggtaattgatgcagggccagtgggaggcagaacacagagtaccactgagtaatatctcctctgttcaacattgcagtggggatttctgaacccaaaacatcaaatctgtgtggga

SEQ ID NO: 13505 - DNA, 919 bp, Homo sapiens
gctgggaaggtcctctaagatgtttaaataacccttaaagcggaatcaagatttgtttttttctgcagttagagagtttgctccctcccagccggctcgctgagcgctgtggaacccttcggctgggctcccctgaaatcgggcgcttgttctgggacaggcgcagaagggaccccgggaatcacgcttgcgctcgggatgtgcagggttccaagggtgacacaggggaacttttctatgcaagggctagctgctagtgcaggtctcagacttaccttccgttcatttcaagacaaattgagctcaaattacccttttctttttcgttaaatgaatggggaatgaatgaatgagattttctgttttgaagatgaggctcatctcccctcccctcgcctcccctgccctcccctacccctgccctcccctacccctgccctcccctcccctcccttcccttcccctgatcccaaagttgattcccggttgcaggaacacagcgtagaaaattcgatgcattctctcaggaaggagcctggagtgggactcaggggacctgggtgctggtctcagccccacgccagtcgtggacaggcttctgttccttgggcttctcgtctgtagaatgacggttggagagaggatttttctccttctcttctacaaggatgtgctgtgacagccagggaagggctggccatgcacagtgctttcatgcatgggctctgactgtcaccaaagagccagacccggccacaggccatcctggaagaggggagagccctttaatgtgggcagagggaatgttggcccgccagagttccctctcaggtgtggtgggagtggcagttgaatggggcagttggagaggaggacttcaggcgggtgggacaagagaaactgaatctgaggtccttgg

SEQ ID NO: 13506 - DNA, 919 bp, Homo sapiens
cgcctggcctagaggtgtacattttttaacagaaccattcaaaaggaggttgtggggatcatgacacttccatgctacagcattaatctcctaagaataaggatacactcccacataccatgacactctgttcacacctaaaaaaatttacatttattccagaatatcatctaatctccagtccgtgcttacatgtccccaattgtccccaaaacatcttttatagatttttttaaaattttgtttaaatgccatatccaatcgatatggcaatcaaatgcaaatccatattgcatttggttatgtctcttagtctttttgcataaggggggcctctctttaggatgcaaaatctttatcatctcttcttttccacttggggacttgggctgaaaatcaggagtggctggaacacgcccatttactgtttggttttgcaggttgttggagggtactacagaagaacatccctctggagaggggccgtgagcctggttggcctagactgagtgccctggcagagctcttcctcatgtgtgcagtgggaaagaagcccagatcagtccaaaggcctaacccccactcccagaccctaccctactcttcagagaaataggctccctaccctgaaccctaaagacagctgtaccttcatccccagggacccagcaccccttctggcctatccccaaagagtcaccctgggtcttaggtagtaggtggagctgagggataatggcccaaggccaagagttgatccttccaactttgttcagtgatccagctttcatatcaggtgatcaggacaaccaggccaatctgatagggggcggtgtttataaaaaggccactcacctagagccagaagctccacaccagccattacaaccctgccaatctcaagcacctgcctctacag

SEQ ID NO: 13507 - DNA, 918 bp, Homo sapiens
atttgccctcttatcatgggattcattagctcttctctgaagagcatttagaacacattgatcctggatacatatcttgtttctctgaggacatacttttcctttaaatccacctgctttttttcctagagagacatggaaatcatttctggctcttgttccactcctgacttttttcccccactgaaaacagagtgaatggtgacactgagtttttctaaaagaactttatttcccatgcactctaagattgtgtgatcatcattaatctgtattggggcagtgtgtgatgctggctgacagtgtggtgcttcagaatcactctaactggtttttatcctggctcctgtctttgcaagatgtgtaattttcagcaaatggcttaacttctccgtacctcattttcctcttcagttaaatgggggtaacttcatagtgttcttatgcagaataaattagataatagatgtaaaatgcttagcatagtgtttcatttattttcagtgcttaatgttagctgttttattatcaccatcatcatatatatgtatgtttttcataatggagtcttgatctttacacaagtttttctgttttgagtagccagaatactctgttatattagagtaaccatgacaaaaacaaaacaaaactacccaacaataacacaacaaccccaaaacaataagcaaatttgaatttaagataaaattaatgcagtatttattcagtaattattctttaattacatgtaattaataacttggaacattttaaatctaaaatgttttctgtaatttttaaaaattttgttttacctgataacatactctttttatcatttcagaatgatgatattgaaacagatattaacaaactaaaaccccagcaagaaccgggacgaacaatagaagatct

SEQ ID NO: 13508 - DNA, 918 bp, Homo sapiens
ccgggatcaacaaagacaagatatctttaaaatcgtcttctaaatttaccctaatgtaaaacaaatccaataaaactctaatgtaattttttaagaatttaaatttggaataattccaaagaacaatttttcttaattttctacagccagaatatatacctttaaaaaaaatgaaaacagagattaactttctcagaattggttgactcactctttccttttatttttcttccatggaattttccagttaacttgagaaagtggaatcgaattccgatgttgaattttccttctggccccattcatgtggcaggtggtgattcaggtactactgggggctgctcagacaaacctcctcatcagacatcaagaggctgttgcaccaggagggccggtaccgtgtctagaggtggtcggcatggggttggagttgtattacataaaccctactccaaacaaatgcatggggatgtggctggagttccccgttgtctaaccagtgccaaagggcaggacggtacctcaccccacgttcttaactatgggttggcaacatgttcctggatgtgtttgctggcacagtgacaggtgctagcaaccagggtgttgacacagtccaactccatcctcaccaggtcactggctggaacccctgggggccaccattgcgggaatcagcctttgaaacgatggccaacagcagctaataataaaccagtaatttgggatagacgagtagcaagagggcattggttggtgggtcaccctccttctcagaacacattataaaaaccttccgtttccacaggattgtctcccgggctggcagcagggccccagcggcaccatgtctgccctcggagtcaccgtggccctgctggtgtgggcggccttcctcctgctggtgtccatgtggag

SEQ ID NO: 13509 - DNA, 918 bp, Homo sapiens
cgctggtctgattagcataggaccccgggccccgccccctgctttgcatgcgcacggccggccccacccccgctgtcagctggaggaagcggagtaggaagcggccgcgatgtccttttgtgtcctacaagcagccggcggcgccgccgagtgaggggacgcggcgcggtggggcggcgcggcccgaggaggcggcggaggaggggccgcccgcggcccccggctcactccggcactccgggccgctcggcccccatgcctgcccgaccgcgctgccggagccccaggtccgggggcggaggggagcgctgccgcgggggtgggcgggcggggcgcgggggccatgtgcgagcgcggcagggaggcgggcggggcgggctgcaggcggggtccgactctggggccagtccgggccacggttgggacccagtcgagggtcggactggtcagggttcaggcgggatccggcgtccgagtcctggtgggccggcctggggcaggatctggctctggctgcgggtcctgactcgggtcagggttgggcctccgatccagcccgctccggggcagggttcaatcccgcatttgccgaagtccctggggctggccggggtggaagacggggagggctctatgtctgggaaggggctctgaagaccacgtgggggcgctcgaaggggcctggggccaccctcctctctgggtcaaaggtcatcgcaccggcaggggagaacttcctcctccttggctctccccacttacttcctgataacctggtagaggtctcccgcgggcggggagggggaggcgtagcaactttaggcaacttcccaaaggtgtgcgcaggttgggggcgggacgcggcgccccgggaggtggcggcctctgcgacagcgggagtataagagtggacctgca

SEQ ID NO: 13510 - DNA, 918 bp, Homo sapiens
aatttgggctccttaccaggatccctcgccaaggacagaggtcagtgcaacgagtcgagggtttgccctttgaaatgggctaggaccggcaggtggcagactagggctgcttgagttcaaagaccgcttccaagaccaagcccggagccagctctgtgctaagcgttccatcacacaaccgcggacagcttcttcggcttcttcaaactctcctttccctcccccgcaccctagggtcttcgcccagaatccatcaggaaaaatagccccacataacaggttcaaatctaacctccccaagacaaaaccacgtccgcagggaaagaagcgagtaaagcgagttttctgtaactcccctttaacccaggagcgcaaccagcccgggaaatctacaaatctctctttagttcagcaaagggctgggagcctaagccaagggggagaaagttggggaatccctcttgaattccccagaacacttaggtggcgccgggctttggtgcacgcgcgcagggcatgcggacaggcaccggagaggctctattttgggcattacttcgggaaggcggatcttcttgcagggtccgctgatagcgggtggcaaatgaatatgaggggcagtgcaaagggtgggggttaaccgggcggtttccatggcgcccggggcgtgggggaggaatgcatcccgcaagctgtggcgaaacaactgctctgcccggaggaccgggctcgagaaggcaagagacactgggtcgggggtggagtggtggcgggggggttgggggcggaagaagccaggcaggacgggggcggggcggtcacgtgtgcccgactgggcgaggccccaagctggcccgggagaggactctgcgggcgaagtggctgcgcaaggagagaacttttcctgcacaaggaacg

SEQ ID NO: 13511 - DNA, 917 bp, Homo sapiens
aaaggagctgctaaccagaaagccccccagaggagaccgagtcagctggggaattagaacatccacatccatttagctcctctaacaccccacagacaatctctgaacttaactaatgtacaaaaagtttcatttctgcttctcaagccccaaattcccatgtctggaaggagggggcttgtatacccaagagacccccttatcctcaagaaagaaagatggaggttctaggagccattttagcccattaacccacctgccatctgcccagtatatgttaggtacaggaggagggggaggtgtggctagtgcaggaaaataatgcagagaagatacaacccactaagccaagaatgtggggacagttacagctgtgcctcccctgcttcccttcctggaggagctgaaagatggggaattcctgaggatgggcctaaaggggctgggctcactggtagaagtgggaatatcagagactgactagtgtagcttggtcacctagtccctactaaaaagccttatagcctttcctaggatgagactttgaggctcctagacaaaggcactctcccaggaggaaaatcttaggccctccctcccatgagggtcattgcaacatgagacccaagggagttgtgaagtcagccccagccccgcctactgttcctgggtgctaatccccagcacagaccactcaggaggagggattggctgaggagcttggagagggggcgtcatcacctcacccaaaggttaaataggggttgagatatgatgctcaggagaagcgctttctttcgcgagcaccctgaaccagaccatgacccagaccctcaagtacgcctccagagtgttccatcgcgtccgctgggcgcccgagttgggcgcctccctaggctaccgagagtaccactcag

SEQ ID NO: 13512 - DNA, 917 bp, Homo sapiens
gctaccctgtcctatcctggactagcttcatacttggttcaacctggggccactatagccaccacttggcctcagaggcagtctcagcccagcctcagtttttccagccatcgactgggaacatcagcagcccacagcagatgaggacattcagaggccaccgtggcatgcacgcaccaggtgtccaggccgctcacctgctccccttccggcccccctcttcttccacctgatggaagaggaaaaagaggtggaagcagcaggccgcctagtcaagtcgccatggccttgcctccgcactggcctgtcctgactctactccaatgtccgggctgggccagaccatgccaggccaggccccagggaggtagccattcacaaggagagaggagcaggcggcaggccgggtgggggagcagcccataaatcaagccccactcccacccggtttctaacaagcggggctgcctacccgcctctgtggggtccctgcctctgggctcccacagcgggcctggaacagccagctggccaaggcctctgcagtgccttggcctccgcccccaccctcagcccccagatagataggggtattttttttcttttaggagaagaagaaaaaatagacgtaaatgaagagaaacaccaacaaagaaggcgagaggcctgcagagtcacgtgggggcagagaccaattgggcctccggtggcccccccaccagggcggggaggaggaggaggacggacggacagggccagcctgctgtccggctgccgcccgccgtggtgtgagggggtttctgcgcacccacagtcgccaccgtcccacctgggctgccggagcctccccctggacccctggtgcccactgccaccctcatccggtgtgagagcgctgcttccgcttcgtaagtgag

SEQ ID NO: 13513 - DNA, 916 bp, Homo sapiens
cgctgaggattctcaagtgctaagttgatgtctggacaatgtcatatgacttaggtgtgctgtggagggaaagggtctgggatatagtacagggacattctcactctagcgtggagggggaaaatgaggcacagagtttagggaggaagcagcagagacctccagtccacaaaaggcacatcttcccactcacctccaccagggagtaggggcagaacaaccaagactggctttggtccctggcagcccagctctcacaaagccgggtggatgggtctgaaagctcccagagacctgagcacccctgtctcagatcccagcatccgtgagtgacccaacctgcctacccattgagctgtgtaattccatgcagaacacagggatccattcttcttcctctgtaatcttccacccctgccctcccagctccccaaaggtaaacaccttcataatttggagtgtttccttctagaccctttcccccacctacacagtcatatatacagagccatagaaaatatgtaaaatacttagtaatgtagtaatgttgtaggtggatatttaatagaaatgatgcaacccttgggaggctgaggagggcggatcacttgaggtcaggagtttgagaccagcccagcctacatggtgaaaccccatttctacaaaaaaaaaaaaaaaaattagccgggcatagtggtatgtgcctgtaatcccagctactcaggaggctgacgcaggtggatcgcttgaacccaggaggtggaggttgcagtgagctgagatggcaccattgcactctagcctgagtgaaagagcaagactctgtttcagaaaaatagaactagaagtagaaatggtacaacccacctatgtcattctgcaacttgagccctctcatcaccagttatccatgctg

SEQ ID NO: 13514 - DNA, 916 bp, Homo sapiens
ttccggataaagatgcctgtaaagaggagttgatgcgaatccagaaaagcacttgaaatgcccaggctttgcatggcacattccccaggattttttcgcaccgcatttagaggtttagacggagtgagctcgaatcaggccaaaagccttaggttactcctgggcggcagcggggcagaggtcagatcaacaggtgtggaaggctgcgaggtgagggaagaagcaggtgtcggtggaggccccagttcctccggcccagaggctccaacgctgctattggtgttccagcagcgggcggaggggtcctgcccggcatctgggcgcgctgggcccagagcccgggaggaggcagacggaggcggcgggtcagcggcgggccagccccggtgggcttccgctcccctccgccggcccggtccggcccgccgcggaggatgcctggaggttgacgtgaatggcctgtggctgggaagcccccaggcgccctgcctagcccgggggcggggccgcctagccgccggccccggtggcgtgagggctggggcgggggccggggacctcgcggggagggagcgggagggaaagcggcccccgcggcccttcaattggccgcaccgcccctcggcgcagaggcgggaggaggcggccctccattggtcgggcccggcggccaatcctcgaaggcccaggcggaggcgggggcggcctgtggggaaccgaggtgcgggcggcgagcgaggcagccgggtgcttcgcagcggagctcgaggctctgtagcacccagttggacccagtcgcccaggcaccgcccgcgccccgcggccgtctcctgcgcctcccagaggagggagttcgagcatcccccgcggcggccactcctcggggccaggagcggggaagcgaagtgcgagagac

SEQ ID NO: 13515 - DNA, 916 bp, Homo sapiens
gtcaggggtcagaggtcaggtggccgcgttggcctcctgggctgcgggtggagtcgggggtctggagagggcaacttggactctgaggagactgctggatggtgtgacgggcgttggggggctcggaggtcggagcgtggggtctgggggtgacagtggctgcacgtaggatcgaggcttgcaaggacgaggaggagctattggcgtttttcctgacactggcaggcttctttccgagaaactcctgggctccttggggaggctggaaggaactgattcgggtcatgctgtgaagtttggtggagtccggaagctggccgggctgaggccccccgtctgctgggtggatcagtttctgcagggggtgtggtgtttttgacccacttgatttgcctgtggtctcttgagggctgcggctcttgccttgagcatagaagaggactagagtttccctgtgagtttccatgtttctgcttgctggtgtcaaaaccacctcctatgttgtgttagcaggaagttttttttttttttttttttttttttttttttttcttcggctggaatgacctgggtacaccctagatgctatacagctccagagctccagagtccttgtctgattgctgtggcgctgagctatgccagggccctagggaatgagacattacgtggagggtacctaggataaaatcagccactggtgaaaacagatcagagataagcaaacgtcaagatttcagaacatagttctgttccaaagctgaagtctggaatgctgaaaattatgaattgtgttacgaagataagtctgagtagaatcattcataaacacagtaaaatggtttgtactcctgtttcataataaatattattgtttgagtgtttgaatgataaactttggaatttactgcatcca

SEQ ID NO: 13516 - DNA, 916 bp, Homo sapiens
caacactggaaaaggtaactgggaagaacgatatgccgtgcaattttctcttgccaagagtggcgacgcaccccacccacccctcccaggacaaaggtcacagcagagccgcgcgccttgacttttctggccgaggtctctctcccctcggtgctaccctgaacttgcccagtatgaacgatgaaagggagaaacactgaaaagaaagaaaaggcgaaggccctggcttcggcgttgtaccaatgactgacaaagctgatgtccattcatagtctcgggcgggagagggtgtttggagagccgcggccccttagccaattgctgtcagcaacatgtggggggggggggggacatcgctatagcaaccggtggctgggccgcgagccgcgccgccgccggccgggtgcgcgccgggccggatataaggcggggcgcggcggccgcgctggttggtgctacgcgcgcggccggcggccctaccgggaccgtccggagcccgccctgagcccgcccgcgccgcgccccggcccagcgtgcctagcccgggggccgggccggggcggagcacgcggagctgggccgagcggccgcgcagagctccggcgcctgcgggctccgagcccgtgccgccgcgcagccgctgctgctggagcagcgacgcgcggcacctttgtctcctccggccgccctagaagtttgtggtcagaagcggatgaccccgctagtctgtggctccagcgcagggaagcagctggctgtgatgatggcgctgccgctacccgcagctgctgcgccccgaggccgctcggcccggcgcacgcccccacctcctcccgcgcgggcgctgggcgccggcccagctgcaggtaaccaggggtgccgggcggggcgcgggcgctcgtagtgcggttgggtg

SEQ ID NO: 13517 - DNA, 915 bp, Homo sapiens
ttgctaatcactcaaaggatcacacagaactatatgattttaataagcatgtggttgtaattgttccattttttaataatccttaactttcctgtagatttttggaaacattttcagtaaacattgaagaatagggaccaagggtcattgtgggattttctttctgttttcagacgtgtcttaaagacattaacagagcacagacacatgggtatccagaaaggttgcaacccaagattatgttacgtaaagcagaatgtctggtggccctggggagactgcaggaggcaagccagaccatcagtgatcttgaaaggaacttcacagccacaccagccctagcagatgtcctccctcagactctgcagagaaacctccatcgtctgaaaatgaagatgcaagaaaaggacagtctcacagaaagcttcccagcagctctggccaaaacccttgaggatgcagcgctgagggaggagaatgaacaactttccaatgcctcatcatccatcggcttatgcgtagatcctttaaaaggtcgctgtctcgttgccacaaaagatattctcccaggagagctcctggtgcaggaggatgcttttgtgagtgttctcaacccaggagaactgccaccaccgcatcacggcctagacagcaaatgggacaccagagtcaccaatggggacctctattgtcaccgatgtttgaagcacactttggccacagttccgtgtgacggatgcagttatgccaagtattgcagccaggagtgtttgcagcaggcctgggagctctaccacaggacagaatgtcctctgggagggctgcttctcacactgggtgtcttttgccacattgccctgaggttgactcttttggtgggatttgaggatgttcgcaaaatcataacgaagcttt

SEQ ID NO: 13518 - DNA, 915 bp, Homo sapiens
ctaaggttgcaactaggggaggtacgaccgagactgcgactgacaggcctgaagtctgggaatgaatattcaggggattcctttccccctctctcttcccctgtgtccccgcctccccagcactacgccatctgccccctcccggtttctcctccctccaagctacttatccacaaatctgtcccttgagtattcagtccctccctaattctcccctaagcacccctccgactttggactcccccacaactcctcgctacattgacctctgacctttgaactctagaaataatcctcaacactctttcctcagtttgcccccaagtagcctggcctcagggcgctccaacatcccagctctccccggtcccggggtttgtttgctagagtcaggaacaaatcaggcccaccccaggtgaactgtcgccgcagacgaagagcgtgaggattgcaagaatttgtagtacaccttccactcagagatcctcaaaggtccgctccgcataagataggtcacaccctcaaatttcggctccacatctaggttgttgtccctccaaacgcctcagatccgccaagatgcaagggcctggatccagttgagcggcaaggtctttgagaaaagacttcatttcccaaaaggctccgcgtctgcggagtcgcagggcaccataggaaatgcagttccctccgagcaccagagagtggatttccggatcgcgcaatgcatgcgtggaagtgcgtccccggaagtacggaggccgacaggaagagaaggaaaaaagagaaggcgctgtcccgctcttgctacggtggcctggaggagtggcgaaaccggaacagagaatttatcacttctgggactcacagtcgtgatgtctttcaagagggaaggagacgattggagtcaactca

SEQ ID NO: 13519 - DNA, 915 bp, Homo sapiens
agaaggtcctggtgaataaaggcccagggggcgtgctcttgaagtgtgctcgtggtgcagcgccggcgggggccaggagggggagctgcaacccaggctgtgggctgcagcctctcagggcttctggtgaattctgggcctggggcctcagggtagggcaccaggggcccaggggctggggtggggggcccaggatgcaggggtctgcccctggccaggctctgccttcagaggaggctgagcgtcgtcacacgggccgggctgaggccctgggccctgaccgtgcagcctaagacaggactgtggctttaagaccctcctgacccctgacctctgcccccagtggccctggcccctgggcagcccttcctggccgccatgtgtacccagagcctgggactggctgggctgggcagtgacccaggtgggaaagggtggtcttgccctctaaggcccggcacaagtgagaggcctgggggtccatgttgggctgggctgggcgaggggtggtctctgacttcctgggggttctggctgggatgggcagggggctgggtgggagagtgtgggccctgccctccgaggccgggcatgggcgagaagcctgggggtcctggctgaactgggctgggtgaagggggccccctgacccccttggggtccgggctgggctgggtgaggggcggtttccgacccccagccaggttcccaggcaggatgagctggggttggggtggctaggccgtgggccttgggagctgggcagtctgggctgggctgggctgggcagggcgccacatggaagctggaggagcaacgggagcgctgggcgtggggtgcaaattgcccggtgccttctgtttcccaggcagctctgtggccatggatatgttccagaaggtagagaagatcgga

SEQ ID NO: 13520 - DNA, 915 bp, Homo sapiens
cttgtccacaagttcctgtacccattaccccacaactcacacccacaacataatggcaggaggatgcgcacacagtaggcgctccagcgaactctcaggtgcagtgcccttgcttggcgcgaggaggcgccagcaccgcgcacagaccttgcccgcccccgggccggcaccagcagcccaggcaagtcagtgggcccacatttatggagcgcctcctgaaatcctgggttgcattaggctctcggggtcgccggctgggcagcgggtcggtgccggtggcgggggatcctggctggtgactggggaacatccagggaacgcgggagggtacccggagcaaagttcccaattggacagagcggggtcgggcctcgaggggcgggagcgcttccggcaggggtgtccaagcgagtcgtgacctctgacccgccggagaggtcccaggcccaggcgccactgcggactcgggtcctgcctgctctgctcccctccgcgcaggcgcggccggcggcagttcccatggtgacgggggcgcgtccccgctcgaggccccgcccccagcaggctaggctgcgcggggctgcgggctcccagggcaggtgccgcgggctgcgggcaggtggcggcgcggcgcgggctggcggtggctccacggtaggttgcgcagcggctgcgggcagtgggggccggctggccgcctcctgtccccggccgacgaggtagctgggggtgacggcggctggcgagggccgccaagtttctgcccggccgaggccccgggagaaaagttggcaaagttggccggggaagaggcggggagccggaggatttccccagactccgggtctgcagggagggaggatcccggtttgggagccggggaatccgtctcccgagacttgagagtggatcccg

SEQ ID NO: 13521 - DNA, 914 bp, Homo sapiens
taaaagtgctactcttgggccagcatagtatcagaaattagctaattcatatggggcagtttaggctttaactaggaaatgatggttatcttaatgacaaaaaaggtactgacaaaagtccttttttgaacatgtgttcaaaagaaaaagagaaactatcaaactaataactgagtttgttgaacatcgagattgactgatctgagaggcttaaaactgattgccctgaaatagacttgcatgttttggatgatggctttgggtctcccagagcacttggtttcccttggtgctgattttttctctcaggattaaagcccctttatgtgatgttgttacagcagcttattgcaacttcattcagctgcttgaaaaagaagggagactgcctctaggttccatgtgttctttcagggatggtattttgatgttgcgtattctcttgaacatgtattcttccctgagaatttctgtgtgccgtggtagaagaaatacttgccagaaatcgccactcatggtatgcttttgtagtgtcgaagtgtcccctagaggtgacaaggcttgtgatagtgttgattctaacaagcatgaatctttcctttattttagcactgtgtgttacgtgccagtaatttgcagcttatcctttgtttctagctaggtaagctgggaaatagcctagtactttgtctatgtgtttatcttcaaaatgtcccaaatagccctgggaaaaaggtcgtgcagctcaatgggggctttcaacttacaattttctttgttttaggctccataaaaatacagactcaccagttcctgctttgatgtgacatgtgactccccagaatacaccttgcttctgtagaccagctccaacaggattccatggtagctgggatgttagggctcaggtaagt

SEQ ID NO: 13522 - DNA, 914 bp, Homo sapiens
agatagttgtcgaccaaacaggccaaagttttcttcagtagaaaatgccctgccaaatggtttctggatccttcgcggacaaacagcaaaggagctgaaagcgacctctttcaaccatgccagaaactgtccatggcgcttctagattcacaaaatctgttttagacacagatgtctttaaccaagattggaaacccactggccgtcccatcccaaagtaaaaagtgccacgtcctcccatcctccgccttccttgggatgtcagccccgttctaattcctttttagtttctcctcagccctcggcagggctggcagggggctacctgcgatttcccaacgtggacgtggacaatcggatttgtctctacccaagctggcagcggatggggacgagttctgttcccgagagagtctcagaagtaggcacggaatcatctcaccgattttaatttctgtccctgggctggggagaggggaggattggggcgcgggaggctctgttctcctcctcccctcttttccccacctcccaaaattggcagccagtctgtggctctcggtctggggtctggagggtggggaatgtgggtgtgggggccggctggagaagctctcgctagcgctgcctgtggccagacccgcctcttgtcccctttcgggcgcacacacacgtccacccagacactccgcgcgctccctcgcgcttttgcttgcccgcccgccgccgcctgctttttccctcctgctttcgccggtcgccttctccttctttttttttttttttttttttttttttttttttttttttttttggtaccatagagttgctctgaaaacagaagatagagggagtctcggagctcgccatctccagcgatctctacattgggaaaaaacatggagtcagctccg

SEQ ID NO: 13523 - DNA, 914 bp, Homo sapiens
tggagtcaaatctgggttgaagtccaacctaggttgaagtcctggctgccacctgacctctgcccctcagtttgctcatcagtaaaatggggttaaggaggctgcctcgcccagctccacggagccggaggtgatgaaggtcctggaagagcagaattcagaacccgagctttgggcggcggagcaggacagggcgcgggtgggcgcggcctccgggaggccagcacgagggggagcggcggggcccggacacacccagccagaaggaggaggccgaccccgcgccgactccgcagatgccgctcgggacttcgttgtccctccaggcgcccgccctggggtcctccatcacccgccgtcacctgggcgcggggaagctggcgggaggggaggcggggcttggcggcagcggcgggtgggggccggggagcgggggcaggggcgggcggacggagcgcggggctggggacccggggtcccagaagggggcgcggggacggggtccgaggagagggggccggggcggggcagggcggacagggctgggggcggaggtccgggggtgggtccggcggcgagtccgggtcggggcggacagagcagggggcgggggtccgggaggagggggccggggtccgggaggagggggcggggcccgggggcggggccggggtcggcgccctgcggggaggccggccacgtgacgcccgcggcccggcggggctgccaggcggcgagcgccgcggcggccccgggaggtggcggcgggcgcgagagcctgggccgcgcgggactgaccgtcggggccccgggacggcggccccggggcgcccatgccatggagaagctggcggccgggctggccggcctgcgctggagcatgggcgccttcccgctcgacctcatcgtcagcc

SEQ ID NO: 13524 - DNA, 913 bp, Homo sapiens
ccaactctttcgtttggaaaatgcctacaagctcagttcgtggcaccttcccaccctcactccctatccctctgcaaagaaaccagggaacttttctttggcattgtgggtactaagatgcgccaggagtcccgggtggtgcgcgagcggcggaattcgtgacatcgccaagttgcgagaggcaaactccccgattccatccaaagcctctcgcggagcctttaagagacgttgtgtgtgcgcgctgcgctagtctccccgccggggcggaaacctcgggtgcgggatgtggggagagcagaggcagcgctcgcagggccagcacgggcccatccccctctcggcggcggcggcggcggcggcgcggccaccccgtccccgcccccccaacccccggtcccccgcgtgccccgcgccgcgccggcgacgccgctcgcgctaggaccgggctgcgcccgcggccgccatggcggggccgccgcagtccggccaatgacggcgagggggcggcgcgcgcgcgcctggccaggccaaccccggctgctgccttataaggcgcgccgtcgccatggcaacgtgcgctaagttgcagcagtcgtgtcaaagttcactatatagagagctcagtgagctgatcgcggagaagccacttctgccagccccggcgcctataaatcgcattccctcccgcgcccccctttttagcatatttgatcactttgattctctgttcttttctctccgcggtgtgtgtgtgcgtgcgcgcgtgtgtgttttcttcttctcctcctcctctccccgagttgcctcctttctccgggtgccgtactgccttttttcccctctttcattctttctctccgtctttttctcccccctctgcgcacgaaggatgtgcttctaggtggtgatc

SEQ ID NO: 13525 - DNA, 913 bp, Homo sapiens
aagccccagggtgtcaactccgaggcccctccccagcatcccgctcgtccccgggggcggtccgagtcccagacatcggagacctcccgggaccccggggctggaccggccacagggtccgggctgcggggccggcccgcgtctgtctggtccccgggtcccccagcccgcgccgggagcactcacgtatctgtgcacgagcgtccgcacgaggctgcagtccatggctcctccggccgctcccgctccgccgttcagcgcccccgcgcccggctcggcgcgcccatgggctccggggtactagtgcggccgcgccccccgctccggtcacggcctcggcgcgccgggcggtgcagggggcggccgcggcccctccgcgctcatgcccggcccggccggcgaatgctgggtccgcggccccgcgcgtcggcagctgctccactggcggcaaggctgctgctcggggccgcgcgcgcgcgctctggcgccttctctctccccgtcggtccgcccgctcggttgggctcggctggagcaccccggccgcggcggagcctgcgctctgctcctcccgagtctcctcctcccctgcccgccgccctctggagcctccgggccccgctggctcctgcccctgctccgggcgcgcacgtcaccggcgcaagtgagcatgcgccccgcggccgcagcccccgccggccccgcgcccacacccgcgctcgcacccgcgcgccggccctgccccctcgcgcctccgcccgggccccagaccctgggggcagagggcagagggcagaggtcagaggccgcggggaggaacccccctgttgcttccgcctcccggggcgcaggcgctgggcgcggcggggaagggactcggcactggggaaacccggagtttcagccagggtcc

SEQ ID NO: 13526 - DNA, 913 bp, Homo sapiens
caagctccattttcataagtggggatgataagcacactgaggcccacgtgtcttgtccacagtctcttgattcccaattcagcacccatggtaccattgctgcctatttgacttgagaacttaattttctccctttgtacaactggaagtaaataaaagagattcattcattttacacgagaaaaattggtattggaattgtttgcggacaaacacaagaaccaaaaacattagcctcaaggtgaagagaggaaccttggcgtccacaatgacacccagtttaggggtccccagagatgttcggtaagacatgcttccagaaccttccaggtgaggaccaatactaattctgcagtctacataaactaaaaatgaaactggtcataaggtaggcagccccagctgacctttcacctgtgcctgaactaatgcaagtacaggacctgagtgctacaggttgaagaagtaagtgatcctaggagttgaagggtcagaggagccaggctgacacaactcatagaaggtggaggaagctgatcttctgagcctcagctgtggttgatcttgataactcaaagagttaacacaaccaaaactaacgcaagggtggagagaaagaccacaccccacgggagcgcggagccaactcgcgggagaaaaatcctattggcattgaggaggtagggagccagcccctgggcgcggcctgcagggtaccggcaaccgcccgggtaagcgggggcaggacaaggccggagcctgtgtccgcccggcagccgcccgcagctgcagagagtcccgctgcgtctccgccgcgtgcgccctcctcgaccagcagacccgcgctgcgctccgccgctgacatgtgtgccgctcagatgccgcccctggcgcacatcttccgagggacgtt

SEQ ID NO: 13527 - DNA, 913 bp, Homo sapiens
tgggaaacaagattatgcactaggtgacatcttaaagataagaagagtttagaaaagagaactgtggaaattgaggatctagacaattattttcctaaaaccattattctatgtactgagaagtctctggagatcagcaagagtatgtgtcccccaaagtgaaaattactgaaccaaatgacctctgacctccctttcagcaggcagattccttggttatatagctcatcaataggtcttattaccatgaataagatggcttggttttaatctggggagtcatgtcatatagtggctaatagtataatctttggcaccagataaatgtgacttaaattgatattttgctctttatgaacttaaactttccgtgcctgttttcaaatttgtaaaagtgaaataataataataataatagtagtagtagtaataatagcctcatagagttattgatttaaatgtgataacacagaaaagtccctggtttaaggtaaatgttctgtaaatgttagctatggggctattaggttggtgcaaaagtaattgtggtttttagcagtacttttaataatgatgatgttaatgaaaaatccatattatcttggaaaagtcataagcacttaatccctttatcagcacagtgtgtagtttacactggggcacaacagtgactatatgtccaagtctatagaactaattctttttgttcttatggcaacagatggacaacagcaactggaccagtgtgtcccattttgttctcttgggcatttccacccacccagaagagcaaatcccactcttccttgttttctcactcatgtacgcaatcaatatttctggcaacttggccatcatcacactgattctctctgctccacgcctccacatccccatgtacatcttcctcagt

SEQ ID NO: 13528 - DNA, 912 bp, Homo sapiens
ctgtcactggagaaatctccctccagagctttggcaaagttactctgatctgggtctgtttaaaaggccgggtctctaatttaggaatcggtgatttggaagcttttgcagaacatcaccagaagaagggaagcttcccagagtcagaagctaaattaaaataatttccaaggctatttgatcagccttcttcctttttggttcattgtgtcctgacttggggcactgatgagattttttattttttttgagacagagtttcactttgttgcccaggctggagtgtagtggcatgatctcagctcactgcaacctccacctccctggttcaagtgatatttgtgcctcagccccctgaatagctaggattacaggcgtgggccaccacgcctggttaatctctgtatttttagtagaggtagagtttcaccattttggccaggctggtttcgaactcctggcctcaagtgatctgccaccttggcctcccaaagtgctgggaatacaggcgtgagccactgtgcccgccctgatgagatattttattaccaatgttagtattgagaaactgaaatgtttgaagaagcacaacccaggatcgtgctggtagcaccacagtacttaaactgttggtcaattaaggccagaaagggaaattgttaatttagctctggtgctttggtttacaggaacataactcttaactgacatctgacatcatgatagccatatgtgctcagctctgggtagagtttctgcagttactcatctgaactaatgaacaataactgaccactagtcactttatgccgtgtaactagctctaggccatactttcactggttactggtgtgaaagctgaaattcattttgttacattctggtgaagacccctcttgataatgggaatgt

SEQ ID NO: 13529 - DNA, 912 bp, Homo sapiens
cagtacgctagtcctgctgatgagcaaagaaggtgttgatggcattttgatcaacaagaaatgttatgaaacggcctcccacctctggcattcctagtactgacctatctctcccttcccttccaccgctccccacagcttagcacccctttcgttcccatacacatgtacatttttattttggggaccattaacccacagcccttatcgctgccaaaaccacatgggctggagggccagggctgcatggacagtcacaccactgcacaccagcctggtgatggagcaagactctgaaaaaaaaaaaaagaagcataaaagacctttaacagtccctgctacttgtgaccctcctgaatctgtcatctgtccagtgattttgattttgcaacatggaaagttccaagccttgactcctgagcccagataccattcgcactctggagtcattcaagcatggggagctcctcagagggtgatcaactgacctcccttacctagctcctcctccggaggtttgccctggagttgagccagcccttgaggaggccttcactcccaccgcctctctcccttctggatatgagctcaggcctggctgggctccaggagaatctttccacaaggcaagagataacacaaagtcaaggtgaagatcagggtagccctttaaaaggcctccttgtgccctagagttgccacagctcttctactccactgctgtctatcttgcctgccggcacccagccaccatgtgggagctcgtggctctcttgctgcttaccctagcttatttgttttggcccaagagaaggtgccctggtgccaagtaccccaagagcctcctgtccctgcccctggtgggcagcctgccattcctccccagacacggccatatgcataacaacttct

SEQ ID NO: 13530 - DNA, 912 bp, Homo sapiens
gcccagttgaaggtgtctcttatgtgtgaatttttttttttttgagacagtcttactctgttgcccaggctggagtgtgcagtggcgtgatcttggctcactgcaacctcctccgcctcccgggttcaagcaattctcccgcctccacctcccgagtagctgggattacaggcatgcgccaccacgcccagctaatttttgtatttttagtagagatggggtttcaccatgttggccaggatggtctcgaatccctgacgtcaagtgatccacccatttcggcctcccaaagtgctgggattacaggtgtgagccaccgcgcccagccacttacaacatttctaaccctccctctcacttcttcccaaccagaatccttgatcttgtgggcatttctttctgttctataaaaccatttatctggcatgtctttcagtacacaaagttaggcgtgcccagcccatttgtacaccacagggcaggaggctagccaggctacagtatgagaccagaggattggcactacccactaggaaaaccagcaggactcttcaccagtcagtctatgctgataggcagacaaatgcacatttgacaggcagctattggggaaggctgctgaaacagaagataccagccaaatcccctgtagccttcttggccatgggcctaccccttcctccctctgcagaactgcactgagccaggggacaaaggtcactgtgtactctgctataagccaggatccagcaataccctttctggctaggtcctccaactcccggaaggaggggaggtgtgtgcagttgttttttgtctgctaaacagataaaaaggagctaaaatctagacccaccagataagcaaaccagcactttagagtataacatccagtgatggtcaaactgttca

SEQ ID NO: 13531 - DNA, 911 bp, Homo sapiens
tatgaatgggcagatgctaccttcttcctggccagtcagatggagacttgtacctgaagagagaaagcactaatatattgctctggttagccagcaatgttgagaaaaccttgataaatttaggcactgaactttgacctaccactggctccagagtgtatgacctcacagagagaaagccctctgcttcttcttctgtctccattccacaggaaagatttccccagcagcaaacggaaccactgtctcctctcctcttaccgccttgcattatccagtgtcatttctttgcctttatgagatatcattccaagaacagaggataactgatatctgctttataagcatctcatcgctcagttacttttgcacccccaaatgccctctgcattcatctgcacgtgaagacaaaaacaatacaaacatatgtagacttttatacataattttaaaaacacttggactccacaaacattcttctttagatgagtcatgagaacatagttctctattttgcttatttctcatctctacccctcctgtacatcatatacaagtataaaaggatattaaaaaattgtattttaaaggaaggaaattacaacattcagctatccaaattgtctcattagcctggcctctctgatcatctgaagtttagtaaaaaataatagactttggagttagtaaatttggttttgaatttgaatctgtattgaactattttagcctagatatactatttaaccttcctgggtccatttcctttctttaaaacagaagaaaaataactaccttaaatttaaaattgtatataaaatgactaataaaatgtatgctatatatataaagaatcttaattatttttctttcctcatagttcagtgtcttcaaccaaccatggcaatatt

SEQ ID NO: 13532 - DNA, 911 bp, Homo sapiens
gaatgtgggacatctgtgttcaagggaaggactccaggagtctgctgggaatgaggcctagtaggaaatgaggtggcccttgagggtacagaacaggttcattcttcgccaaattcccagcaccttgcaggcacttacagctgagtgagataatgcctgggttatgaaatcaaaaagttggaaagcaggtcagaggtcatctggtacagcccttccttcccttttttttttttttttttgtgagacaaggtctctctctgttgcccaggctggagtggcgcaaacacagctcactgcagcctcaacctactgggctcaagcaatcctccagcctcagcctcccaaagtgctgggattacaagcatgagccaccccactcagccctttccttcctttttaattgatgcataataattgtaagtattcatcatggtccaaccaaccctttcttgacccaccttcctagagagagggtcctcttgcttcagcggtcagggccccagacccatggtctggctccaggtaccacctgcctcatgcaggagttggcgtgcccaggaagctctgcctctgggcacagtgacctcagtggggtgaggggagctctccccatagctgggctgcggcccaaccccaccccctcaggctatgccagggggtgttgccaggggcacccgggcatcgccagtctagcccactccttcataaagccctcgcatcccaggagcgagcagagccagagcaggatggagaggagacgcatcacctccgctgctcgccgctcctacgtctcctcaggggagatgatggtggggggcctggctcctggccgccgtctgggtcctggcacccgcctctccctggctcgaatgccccctccactcccgacccgggtggatttctccctggct

SEQ ID NO: 13533 - DNA, 911 bp, Homo sapiens
tcagtctgagatgcttccatgaggagcctgtgcctgaggtcaaaggtcaggacaaaagctgggaattgaggggagcagggctcatggattggcagagggccagctcagaggacagagcctgggacactcaggtggggatgcaggggaggacccagcaaaggggacaggaggagcctggggaggggggtgtggggctagggattgacccccaccaaaagggggcctgtcaccactgcaggtagcaggatgaggatgactttgactttgggaagggctgggggaggagggaacccgggcagaaggggggtgtgagtgtggaggcagcaggcagactcttctgcgggttttgtgaaggccagtagcagatgggggaggcgtggggtggaagaagagttcactggggatgggaaggtgggttaatcccagtaggagcaatccaatccaatctgggaaggagggagggaggaacatcgcaagaaccagcccttgttcctgttacaggaacagttacaggtgggtggtggatgtggtgtggggaatatgaggtatcctcgaccaaacctcggtgtcctgagcacaggggagagaagggcgtgccaccaagtgcgttgtagggtccaggccagtccctggggtgcccttgcaggtccgcggttcatcttccattcctgtgagcggccattgcatccctgccttggatcctgagtagatttgctcaggtcatccctgcctggcaatcttcctctgccccaggggaagccaggcctggcgtgggaggttacgggcctgcacaaacctaccagcagggcctccttgggcagcgtggacctggagcttctcttggggccaccagtgtgttggggcaggggaggagctggtgtccttcgcggggagaccctagaagctacctt

SEQ ID NO: 13534 - DNA, 910 bp, Homo sapiens
actgcttttccttaccagagggaaaactaacatatctgaaagattgattgcattccaggtccattctcttatatcagtggttctcaaactttaatgcagataagaatcatttggggagcttgttaaaatttcatttttctgagtcctagaggctgctgttctgacccattggctttggagtggggcccaggaatctgcagttttaacacattcctttatgtatttgataaaggctctcttggaaccagatgttgagaaatgctttttaaataaatggccaaacagactcaaaacatttaggttacttgtcaaaagccattcatgcatctgataaccagaatttgaactcagctctttgtgacttcagagccctgttatacccatgatctcagagctttttaaacctttttaaggtttacggtgaggtgcccctaatgactgcagaaagtaaactcctactgactccactgttggtttcttagggacagctgaaagtcacatataagtacacaatgaacttctattggaacctcccatcagaaattctggtgaattctctattatgctgcataacatatactacacaaaataactttggttgtttgggtgttgcaggaccacctggcttcatgtgtggatttccacggctcttgcccagaggcgggtacactgtgttccaatgtgccacggaactcacgcagtggcactttgtggcttcatgaaggaagaggcaggccacgcaacacttcctccccaagccaaggagaagtatcacttttagaggcagaggagcggaaggcagtgggtgtgaccaaaagtgccatttgttaaaggtgaggaccctacccttagaaaagtgttgatattagtgaactgaagggagctagtatcggggtgagcctttttaatt

SEQ ID NO: 13535 - DNA, 910 bp, Homo sapiens
tgaatatacataatgtcgggggcgacttcaatcttttagaaaaaaataggtttctgggctctcagacgccctgtagaagaatatcaggcagtcaatgaaaatattacggttatgtgtgtgatgtttgtgggttttattaacttttaaaatatcatttgttttttctttctctttctaaatatacattcactttcctacccttctgcgcgtaactttttgtactctttcctaatgagggtccccacaaattgtatgagctgcgcttcctgcaaaaccaggatcagccccgtctgcaacctcaaagtcactgaatttctctgcagtctcagtttccccttttaaaaaaattgggaatttgccctgcatttccttagagttgctgtgaaggccaaacgagatggtggtgggcaaaagagctctgccaaccacgcaggcccctgcaaatgtgaagggcctctgacctggagggttgggtgctggccgacctcgtcaatcctccctactccgacccccgcgcggggctccactgaccccgcccctgctgggcactgacagccgcagcaccgaaccgagcggtgggggtggtagcacccgcccacctggagcaactgggatccgaaaggatggggtgcgggggaggggagttcgggaccaacgggagttggggagcctgaagggtggtcgctgagccagggcaactgacgattccggagggggtggggcgccaggcctcagcccctctcccggagccctccagcctcctcagcagcggaagttccggtgtcggtaagcggaggtcagaggtcagcaggaagtcgatacgtggctgccgtctgtccccgctgaggaggtgcagcagccggagatggcggcggtgctgaacgcagagcgactcgaggtgtccgtcgac

SEQ ID NO: 13536 - DNA, 909 bp, Homo sapiens
tttcggtagactctgccactttccccggggatctgaaagagttctccaagaagcccccacttctcaggcggcaacagggcaggtacctgggcggtagcccttatgctactgttcataaatcaatctgagttttatgggtgctttttctgaggaaggagagatttaaagttatgtagcggcaacaaagctttctaataatatttttggcaggctgctaaagaaagatgaaataagaaaagatacaagccctgggagagtggtggtagcccttgggacgccagccagatgttggtgctcacaaatcgggggagacaatggcctttactgttgccatttacaatgccgggcagctcattaatcatcagctaaaatgatttcactttcagggtctaggcaggtcggggctggggttggggagggctgtggcaggaggcctggcttccaggccggggaagtgtcccagagacctactagacggggcccctcccctccactgctcagggcaaagggcaccaggaggcggagcgggggtcgaggtgggagtgggtgcgtcacccttgttttccgggctgtgagtctcccagcgtccccagctttccaggtagggacgccccctcccacgcagcacggttccggcgggtggaaaggaggggctgggctcccagcgcccgcccctctatccatcacatggccggagagtcacaaaaacaacagctttggccaagaccgtgacttcagtaaagggaacccggggctctcgcagccagccctcctgcccatggaggacagtttccttcaatcttttgggaggctgagcctccagccccagcagcagcagcagcggcagcggccgccccggccgcccccgcgggggacacctcctcgccgccacagctttaggaaacacct

SEQ ID NO: 13537 - DNA, 907 bp, Homo sapiens
ccaattacaaagcaaggacaacagataaagttgcccttgagacaactgtattttacttaatgataaagaaacatttttgcagttttatatcccagagtaaccgccactaaaggcgagtgagactcattgcaggcctgtacagtgcgaaccagagttcgggctccagttccgctgtctgcgggtctcgcgcgccccctcccggcggcccagcccagaatgaaggccttggctggggaagcgaaagcgaaagctgcccgagccctgacgcccgccctggccgagcgtagctggcggaccagagccggtagcgaggttgggagagacggagcggacctcagcgctgaagcagaagtccccggagctgcggtctccccgccgcggctggtgagttggtgcggaggggaacctggagcgccaacagggacgcagcccaagtgactacccactccacgctcctgcttcccagtccctctgcacccggcgataggagggagcggagcccggaccacttagctcgccgcggcaggcgggggtgggggtgggggtccggggattttttttttttttttttaagcacgaggctcctgatggtcatgcttccagctccccagaaggccgaaagctgtctgtcgtaggaggggtgtacggatgagcaccggttactcaggagagctctcagggttgaataggataaaatgagaagccgatggacgggttaggcggagccgggcgggtaggagggcagggacaaggattgggactccacccccatgatttctcatctcgtatccgttgacagagccatgcggctccctgacctgagaccctggacctccctgctgctggtggacgcggctttactgtggctgcttcagggccctctggggactttgcttcctcaagggct

SEQ ID NO: 13538 - DNA, 907 bp, Homo sapiens
atgtcactggtgcaatgaatttggtccaaaatacatctcgtcattttgcagcattaattgtacaaagctttctctaaatttgaaatctatgtttttaaaacacagtgattgacaaattgacaatgacctcattaggtagtgacagaaatgattctgagaaaataggtgctgtcaatctagcagagaaatgaacaagaattttggaagatcctgctaatattgagtagtatttgctatatgcggtgaatctaaaaactaaaaaatgcacatttcataattaaggggtagaaatggttatagcttgagtttgggctaagataaagtgtaactggcgagaacagagagtacatgttgaaaataaagagacgcgaggttgaatagattaggattagattatgaaggatttttgaaagcaggcatggtagatcatagagatatagaacataagtgattgattaaggcaatgataggatgatctgttagcagcatttaggataatccatagcagggaaagagctgaatgagaaactacaggtaggaggccgggcgcggtggctcacgcctgtaatcccagcactttgggaggccgaggcaggtggatcatcaggtcaggaattcgagaccagcctgaccaacatggagaaacccccatctctactaaaaatacaaaaaaattaggcaggcatggtggcatgcacctgtaatcccagctactcaggaggctgaggcaggagaacccagaaggcagaggttgcagtgagccaagactgcaccactgtattccagcctgggcgacagagtgagactccatctcaaaaaaaaaaaaaaaaaagaaagacagaaagaaagaaactacaggtaggaaaacattattacatctctaggtcctaatcctctctgttctgaa

SEQ ID NO: 13539 - DNA, 907 bp, Homo sapiens
actcatgccactgctaaatcacaattagagggcagctgttagaagagtcccaaacccagtaagtcctgtattgcaaggaactgcccaatagaaaacaggaataaaaacaattagcaagaataatatgaaatcagttgcttaattccaggcagtggaggcagaaatcttgaatagtaaatactctccgtgaacaagtgcagacaagagtcccgtgattgccaataagtaatcagtttggaaagaccagagaggggtcaaatataggtaaactgagttaatcacataaactgctcaatcatcacaattattaaaagatcacacacaaaaatacattaacaggagaaaaatagtaaaacaggacaaaacagtaaaattactttcttttactactgatgggtcaattttctactggaaattctgaaaagtatcaggttcagctaaagactgcagtgttgatcatctctccagttttcctagtgtgaaatgaaataagcagacctggtacttaaaaagacactttaagaaaggtctggccccagagaggcaggatccgcctagcccagtgagtgaggccgtcctgacacctcgtcaatgcccttgtgtcaacattctagaaaacggactcctggctcattgctccgcctagagccgcgccacctccaaagggtagcaccggccacccgctccgcaaagtccactctcagccgcgcaaaactagaaggtagttgtcccgaaggggcctgagcgctcactcagtcagccaatggccacggagctagggcgggacctgagggtatcctgccaatgggagtatggcagggctggagggagtgcctgggtctcagggctgctgtggagttcgcacctccagctcgggccgatgtggaagctttggagagctgaagag

SEQ ID NO: 13540 - DNA, 907 bp, Homo sapiens
tattacagcctcagcctggagagaacagggcaatcccctctatcccaggtgaaatgattattatcatttattatttattagccagaggtcttaggtgagatcaaattcaatcattataatttatatttcaatatactgcttaacttcatgataggcaatgttctaggtgctcctcacatgtgaaattttaatatttttactgcaactctggaggtaagtactattattataccaattctacagatgaaaaagccaaggaatagcatgcttgaatcacttgcccaagatgccatgtttagatagtggtacagtggggattcgaacgcgggagctcaggtttcaaagtctgtgctctttacatatgcagctaaagagtcagacaagaaccaaaaggagatggagaatagagggtagaaagggcacaggttcaaggtgaaaggtcagaaactgcaaattcggagtttgggttggtctagcagcttaaaggcgtcatcatgaactgttcacctaagtaagttaagctcctgtttgagaatgactgataagcttgcaagccaacttacaaacaaactggggaaatgttccaatagatgactaagtcttttaggtctttttacctgtgtttttcggtctctataccagattagtcgcctggctctcccaaacagaccggccaactgacgtagtcgcgaaacggttaatgtcgaggcgggggcgggggaggcggaaataaagagagcggaagcaaagaggattgtgggagctccgttgtgcgtcgcttaagtgagggcggcggatgggcgaaggtccggtgactgcgactgtcgctgctttctgaggccacaggaaaggggccgtcggtcgccgccatgacagcgagcgaggcggaggtttgtagcacttctta

SEQ ID NO: 13541 - DNA, 906 bp, Homo sapiens
agaagggaaaatggtttttcagggttgggaggtgggttgggtaggtttgggatccctagccgtaggaatggaaaccccagcattcgggctgagggggctcttccttcccctccccccacgtttttcaaatttattttgcccaggcggggattggtgacggtcaaaagggagcagttggcactgaatgtcaccctgaaggtaaaatgaaagacaaaagatgaacgcatgcttgctttccgtttgcagcggctgcggcggcggcaggagcagcaggatttaaaggggaaaaaaatcacacgcatatgcacacatatatacacacccagaggcgtcaattatgcaaacgcaataatgcaatcaaatcatgacagtgccgggaattttttttagaaaaatatagatatttatttttaaaaagagaaacgcatgcaaacagaatcgtgcacataccacgtaaccacccgaggagaacctggcagcctctctcttcttctgccaagttatcattgagaaaacagacaggcatcatgacgtcctgggtcacagggagtgcggaccgacgctaccaagagaaaagggaggcgccttggcgctccggctagccgtgggcgcccctctgcccctcgcagcccggctcggtgagtgcacagccgctcgggacgcggaccccgggtgccaggccggccccgcgcccgcgggggcagagcggggggccgtgcccttgccaccggagggccggccagcaccccctcgcctgccgaggtcgcgggagcccagttaaaggaggcgtgtgtaagatgtgcaatgttcctgcatgggggttttgtagactttcatagccaaagaaaccggcttcggcttctttaaaatccccgacgactcacctgattaacctgctgcagttct

SEQ ID NO: 13542 - DNA, 906 bp, Homo sapiens
cagctctgcccttttcttaaacactccttcagcctcagcttggcttcagtcccaccaagtgcagtctgactcgtggagacatgagagatagagagagtgagagaccagagagatcaggagacagtgactgagagggacttacagggagatcagggagagaagcagagagaaggagaaagcccagagagcataagaaatgaagacccagagacaccaaaggagggagagacagagacacagagagacaaaaagattcagaggcagagactgtagaggcagaagcaaagcaagacacagagcatttcagagacccacggcaagagacagggaacagcatggagaactatgaaaaaataggcttccagagaaagagaaaactccagctctggagggaaagggacttagccagggccactcggcccatcagtggcagaaatggacttgaacccagagaaaaagaaacaagtgccccaaataccaaaggaacccagcccccatccctggcccatcattttgcgacagccccatgactaccccaaaaccaggcccaggctccaactggcaaagcaaaaaaaaaaaacaaagaaagaaagaaagctttgccccatcccaggagggcccccaggcgcagccccctcccacggcacctttccagctggctgtgagccctagggccgcaggaaaggtatggcaagatgatgggagggatttaaagttcacagcgagaacaagaaaagtggggttaaggaggagggtgtgggcagaaacaacttaagaacaacctctgccccaccaccccccaagcacacccagagctgcaggctctagcgcatcccagccagtgtctcctgcagctcagcaggtaaagggccccggtgagggaggcagagaaggagggggtgtctc

SEQ ID NO: 13543 - DNA, 906 bp, Homo sapiens
tggagggagaattgaattaaaaaaaaaaacaacaaaacacgaatatttagatttctttgttcagcggcccccctccagggatcagatgactggcccccctcgctccgaactgactccgggatcaatccggaaggccattgggagaagccgagggcagcttagccacggccggttcccgttccctccaggacgcgagggtcgccttgggtggggaaccgcgaccgggcgaggacctatcccggtgtggggcttcccgatttcgaaagaatctcgctgcacccccgcccagagttcagaccaagcgaaaagttatttgagaggcctcgggggcgcggggtgaggagtcgtggcggaggccttggtcggggcgccgtggatatccccgagtcaccgcgtccctctcctgcagctcccgcgtcgctgggaggagcgagggagcgagcgggaaggggtctagctggcctttgctcggccctccccagcgcccggctttgaacccgccctgcactgctgtctgggcgggtccggggactcagcactcgacccaaaggtgcaggcgcgcgagcacaacccatggctgcgctgggctgcgcgaggctgaggtgggcgctgcgaggggccggccgtggcctctgcccccacggggccagagccaaggccgcgatccctgccgccctcccctcggacaaggccaccggagctcccggagccgggcctggtgtccggcggcggcaacggagcttagaggagattccacgtctaggacagctgcgcttcttctttcagctgttcgttcaaggctatgccctgcaactgcaccagttacaggtaacccgcgggggcatcgcgtcctggggatgggagtgggcaccggaacagagaggctagaggtgagaagacgttgga

SEQ ID NO: 13544 - DNA, 906 bp, Homo sapiens
gtgccatttctgattttgcaacttggggaagaagaaaaaagcgagagaagggagcttgctcgccggggggtggggaggggggaaggagagcgcggcccccccaggaacggagcgcggggggagcgggcgaggggagcaggggtgttggggggggagcctgagagcctgggggggctgcaaaaagagagaaagaaaacagcaggaaccacaacaaaacgccagcagggcgggcgggcgcgcagcagcagcggggcggccgaggcagtagcggcggcagcggcggcggcggcggaggcagcggccggtgtccggctcgggctcggctcctgcgaccccggggcgcccggcgggccccccgccccctccccctccccccttccccttccccttcccctcccagcgcgcccgcgcgccccgcggccctcggcgagcagctcggctccccccagcgctccccgggcccaaagatatggcaatggtagttagcagctggcgagatccgcaggacgacgtggccgggggcaaccccggcggccccaaccccgcagcgcaggcggcccgcggcggcggcggcggcgccggcgagcagcagcagcaggcgggctcgggcgcgccgcacacgccgcagaccccgggccagcccggagcgcccgccacccccggcacggcgggggacaagggccagggcccgcccggttcgggccagagccagcagcacatcgagtgcgtggtgtgcggggacaagtcgagcggcaagcactacggccaattcacctgcgagggctgcaaaagtttcttcaagaggagcgtccgcaggaacttaacttacacatgccgtgccaacaggaactgtcccatcgaccagcaccaccgcaaccagtgccaatactgccgcctcaagaagtg

SEQ ID NO: 13545 - DNA, 906 bp, Homo sapiens
ggtttgcgatcttccaacttgatcctgtccttattccaacccccttttacagatagggaaactgaggaaaggggaaggcaaacaaggctgggcaagggatccctcttaaacggaaggtttcaagacacctggggtcaagagcctagggctttctttaatagccccaatggcccggagcttagtttgcccatctgttctatgggcagggggaaaatgaaaggggaggaggggaaactttagtctttgccgcccacccggaggtaaaaagtctttaaagactaccccggaaagaagagttttatatattccatttgcatacgaacgcagtcacctcgagttaaactccggtcctttaatctccggtccaatttgtcccgcagcggcagggagaggcccacgtgagtaccttcaagccccgcctccagggccccgcccacagggctgggcttcgttgcacgtgctcacccggctgcctcgcgatccacctcctcgcaaagactcattgttggggtggggggttacgaggactcttagggaactttgatcaggtagaaatcacaatcaagacaaggcccggaagtatccgcttactacatagacatcaaacgctttgtcatggttcttgatattgacagactttagctttcccttctcaggacttcttatccctccttccaccccttcagttggtgcggtcggcgtggccggcctcgctgagcggactccaacttccagcgtgccccgcagggccttgcgcggcagcggcgtgtgacgtcaggggagggagctggccagtgctgagggggcgcggcgcggaggggcgcggagcggcgcggagccgggcggctcggggcccagagagagccgcggccgggagctcgcgggctcctgacaacctcctcccct

SEQ ID NO: 13546 - DNA, 906 bp, Homo sapiens
acagtgttggtggagttctcgtccgtggtagctgacacccaggagtatatcatcgaggtgggtgtggggccctggggccgtgctgggacccaggggcagccaaggctgacctctgtccttctgcccatctgcccaggccactgcggacgatgcggagaccagtgaggccacggagatcatcgagggcacccagacagaggtgaggggtagggcaggcgggggcggggaggctccctggcacagccgctcttgctgagccgtggccctgcaggtggacagccacatcatgaaggtggtgcagcagatcgtgcaccaggctagcgccggccaccagatcatcgtgcagaacgtcaccatggacgaggagacggcgctgggcccagaggcggctgccgccgacaccatcaccatcgccacccccgagagcctgacagagcaggtggccatgacgctggcctcggccatcagcgagggcactgtgcttgccgcccgggcagggacaagtggcactgaacaggccactgtgaccatggtgtcatcagaggacatcgagatcctggagcatgcaggcgagctggtcatcgcctcgccggagggccagctggaggtgcagacggtcatcgtctagcatgaggtctgcggggtcctggccgggcagggacagggcagaggactctgagcgccccacccatgcctgcctggcctggtagagaagatggcacaggatggaggcgccccaagacggacagtgtacataagagtttcttgttgctttacaataaaacatgagaacctgcagcttgtgatgttgtggcagtggcagcctccgcggctggtgccaccacctttgcccaggcccccgcagcagcacctgcctcccaggccactcctagactcacgtgcctg

SEQ ID NO: 13547 - DNA, 906 bp, Homo sapiens
cttctccctgcactgcactatttgcaaggctcggggagatgggccccccagcacccgcccggccttctctctgcactgcaccatccgcgaggtgtggggagacgggcttgggttgtcttctagggtgacgtggtggccgttggtggccgtcagggcagggtggccactcccttggctcttcctggctcctcgcccaccttgcggagggagcagcctcatcctcagggctcggacaccagctccacctcgcggcgccaggtcactccatgcaggaagaggagctggaggctatgaccgccggctctgtccccaacacctcgtctccccgatgcccgggagttgtcacctgcgtctccagggtcagaggtcatgcataaccaacatggggctcttcaagcaagggaggcgacagagacagcggggtcagcacagagcaagtgccggcaaccgctctctagcaggagcctggccgaggctctgttccaccccgtcctcagcctgaggctggcctttcacgtccagttgggatgccctctggccctcagacgtaggtcaggactcccggactgtgcccatggcaggcaacaacccccggggtcatcccgccagactctcggccagccctgctgtcttgccagccgccgtgtccgcacaggagccagggttggcactcgatgaataaacgcctttcaagagaagaaacgcagggagctgggtgtggtcaccgtggcagaccgttgggggaggcggggggctgggcaggggacagggtggccggggctggcgtgtgtcccaggggacctggcaggggaaggtacgcccaatcaggaggctcctcgatgtgacgtggatccgtgtttcctcttcttcttcctggtggtttacgtaagagggagagcaatgggg

SEQ ID NO: 13548 - DNA, 906 bp, Homo sapiens
gaacaagaggcatgatgggtaacgaaaggggtgggtctaaggcaactgtttcgctaagaggtgatgagggcattgtgggtaacgaggagcagcgcagggttcgcagaacagattagaattctcccgaggcactctgggaagggccagcacttccggttttaggtcggctactccgaaccagaggtggggtgggggcccggctgccgcggtgcctggtgggacgcgaggcctgaccttgctgcctagccgcctctgccgcgcaacccacctttacctgtccttcgaccctggaacgttagccaatgagagtaccaagctgatacgccaccaaggtcgaccccgtacacgctggagccaatcaaaatgctgcaagggtcaaagccgaccaattatcacagcaacctcgccgcggggcggaatcaaaagagggcctcctccaggagagaggcggggcgatgcctcagcgggcgtggcaaaatgctcagcacagaccaatggcgggttagcaccggaacccgcggcgacgcgagccaataggcgcaggcgctgcgagccaatgggaagggtgggaggggcgccgtggctaccctgcgagtgagaaccaatacaaaaggacatttcagggaaagtgggcgggactttatgcacaagtccaatgggaagaccgagtcttgacgctggtgggcgggcctcagggcacactaaaccaatgggctaggtggggcggggcgacggtggtggcggcggcggcagcgggttcggttgcgcgtggcgcacggggtgggagcggagcccaggccgggagcaggcgccgccgccagtgagaaccggggccggagccgggtgcggatttgctggggctgagtcgggggcgcgcgggccctgacctctgccctctgacctctc

SEQ ID NO: 13549 - DNA, 904 bp, Homo sapiens
tagcagcactttacgcaagtcagtgttagtagggtaagtgggaacagtgtttccaacttctaaattcttgtttggatttaattatatcattttataattcttgccttggcagcaaattttggagagtagtgggagtggccattataaaatgatggaaaggatttaattttgccagcttaaagtaatttttacttttctaaccctgatgtgttttcagtttcaaaattaagacaaaaaaccagctgagacaatggaattagggcaggtttgtttcatttctgcttgtgaaggcttttagtagcaggcatcctgcagctcagtggtgcctctaacacagattgttgcctgccttccgtcgttttgatccttgagagtgaccatgagggccatgttgcagttccctgggaatacaagcataacagctttcagatcccagttcttggtgttggtgaaaaggtctccaccagcccctcctctcattcccaggtcattcagtggcagccagtaggctgcttagactcaggctggataaggaagtgttgggctgtggtgaaacaaccttgcagaaaacgtgattttgcttggaaaggtgctgattctaacctggtcctgctctttaagtccccttgctggtgatggctgattccagggactgttttgggctttgaacacctcttggttggtttctgagatcctcttggccttactttgaagtggccttttctttaaggatcatgtccacgtaacctgtattcttgctgctttaactcatttcaagcctctgactgcaggtccatttcatctcctgtcaggttggttaagtaaagtcagcccaaagtcaagaattacttaaagagatgcaaaccaaatatttgggctccaactttcacagggcttatagccc

SEQ ID NO: 13550 - DNA, 904 bp, Homo sapiens
tggaaaatacctggctcataaccacctcattgagctcccagtgtcccagtgggccagcggacacacacgggtagctgacttccctaacgtgtccccaaagcctccctggattacagcgcccgctgctccatgtgaccccgcgggagccaggacgcgccccgcctcccggggctgcaagttgcgcagggagcgagcgatgcgcagcagagctgggctccgagccggatgcgccttcctttcctctccagagcaggctgcccgcccgcggaatcccgcacgtagagcaacctcgcagcaccctcagaacagccccgctggggcgcgccgggctgccgcggtgacctttccgacgcccctgaccccgcatccggaggcggccggaagtgtcgccggcctcctcccggcgcagcctccgggcctccagtgcaatcactacgccctggggcccggaaaccgttttccggtctttcgctttcggctggggcgtggaggccgcggtgctgcgtaggccgggccgggcgcaggaacagccccgtggcgccctctctggccgccgcccgggcgggaaacgtcgttccggggaccgggcgaccccgcagcggggagcgcgccaggtccgcgcggggaagtgggcggtgtgcggccggcaccgcctcgcaccacgcccccgcgggcccgcactttcccggagtgcaccccgcggccgccagccggggcgatggcggggctctggctggggctcgtgtggcagaagctgctgctgtggggcgcggcgagtgccctttccctggccggcgccagtctggtcctgagcctgctgcagagggtggcgagctacgcgcggaaatggcagcagatgcggcccatccccacggtggcccgcgcctacccactggtgggccac

SEQ ID NO: 13551 - DNA, 904 bp, Homo sapiens
gaggataggggatcctgaagctaggaggtgggaaaggggtggaactgggagaaaccctgaaggaggccctaaagggagcagactgggaaactgggctggaggactcagggggcgaggttggaggaccctggggtgtggtctaggaattttggagaggaagtggaagactctgagagcagggcaaggaatcctgggggctgaattgactgggagactttgggggatgggtctggagaccgtcggggtggtcctggaggacctagaggtagggctgcaggaccctggcccctggcccctggcccctggtcctaggggggccggggaatcctggggccggaaggagggatcctggagcggggcttggaggccaccgggtgggactctgagggtcgacagcgttaagttccagccggctccacccgttcacagaggaccgcgcttttcgcgtgcgcatcgcgggcgacgcgccactgcagggcgtgctcggcggcgccctcaccatcccttgccacgtccactacctgcggccaccgccgagccgccgggctgtgctgggctctccgcgggtcaagtggactttcctgtcccggggccgggaggcagaggtgctggtggcgcggggagtgcgcgtcaaggtgaacgaggcctaccggttccgcgtggcactgcctgcgtacccagcgtcgctcaccgacgtctccctggcgctgagcgagctgcgccccaacgactcaggtatctatcgctgtgaggtccagcacggcatcgatgacagcagcgacgctgtggaggtcaaggtcaaaggtgagagggcagggaggttccagagggagggagggagggagggaagggaggactcttgccttcggggatcccacagtgtgagagggaagcaaaggtagct

SEQ ID NO: 13552 - DNA, 904 bp, Homo sapiens
gtgaagttggttggtacaggagcccaggaccacctgctttgcccgccagggcttacctgacagttggccggcaagtacttaccattattattgttttaacttcatgatcaacgttttaaaaaatcaggagcggtctcattaaaactcagatttccgctttctcttgaaaattcagcagctctggcaaccctgagttccaggtcaggctggaactgggggcgccccatgggaagaggggagggcgcgcgccccctctcgggaggtatttgcctcgagaggccccactaggagcccacactacgctctcctggggggtcccctaggacggggagggaactaataattactgggccctccccagcggcagccgtggctcctacattagctggtttaattctccaaacaggtcttggaggaaggcatccttctattctactgatcagaaagctggacaaagtcccactgccaggctacacagttggtgccatttgcggaggtgacctttgacctttaacccacgcggccacccgcccgagctcttacccctgctgcccctcgcgcgtcccactccccgtccctgccggatccgcttccctgcgctgggcccagcgcgccgccagggaaggggccggagcctgggagcccgccccgccgtcgcccgtcctccgcccgcaggcccacccgcagcggtcacgtgaaggaccgagcgccgcgcgcccaggcggggcctccggcctgcacgaggagggcagagtccgttgcggctgccgccccgacgcccgcgcatccccgctcgccgcgcccgccgccgcgatgtccggggccggcctagccgcggtggtgagctgcctgcgcccgcagcccggcgaggagccgcagacccatgaggtaaggaggacttcct

SEQ ID NO: 13553 - DNA, 904 bp, Homo sapiens
gtggtacacaggtagaggtgggtgccagccttcgtgaagcacctgcagaagctccactcagggagagaacgaggcactcgcccaaacagatcctgggtcacacggggcagcaagagagggtggagcaagtggcctggagcaaagggttggaggccccggggcggcgcgttctcccccaagcccattccagggccatgggcaccccccagaggcagctggtgggactgcagccatgcaggtcctagagggcaggtgacaggggacgtgacagaaggggacaaagggccggcaacatccctgggggaggcacagagagggccagactgccctcggtggactgcggaacccagaacccaacggccaatcctccccctactcctcacccacagtaaggggccagggctccatgcaatgagaacccacgggtgatgccacacgggggagaagccacgcgggggagaggccatgcaggggagaggttacaagggggagaggctgcggggtgagaggtcacatggggcagaggccacgcgggggagaggccacgcaggggagaggtcacatgggggaggccacgcaggggagaggtcacatgggggagaggccacacaagggagaggccatgcaggggagaggtcacaatggggagaggccgcaggggggagaggtcacatggggcagaggccacgcgggggagaggccacgcaggggagaggtcacatgggggaggacacgcaggggagaggtcacaagggggagaggccgcagggggagaggtcacatgggggagaggctacacaggggagaggccgcacgctggggagatggtccctgcgggaagactccgaggcagtctcctgcagctccttccggcgaatccggttcaggaagtaaaaccagccct

SEQ ID NO: 13554 - DNA, 904 bp, Homo sapiens
atcaagagtgccaaggagaaatgcagaatctcacaggaaagcagaattttttttaaaaagttcctgtaagagaatggtgccttgaaacagaaacttaaactgtgatgagttctccaaaggtccgtgagaaaaaaggataggtgagaaacagagttaagagtcggtgacagggcaaagggcacagaggcatttctcaactgcagagatgggagaaccctggaggttggccacctcccttttcatcccatggttgatcgaactccctctacatatcccagactaggatcgcccggcctgtccttattttagaagaagtcacctctcccacccccttctcccaatgccccctttcaagcacgttgtcacccacctccaaggaccgtgcccaggaagatgcatttctttttgtggcgtttcagaaaattccatacagacctcagcatctttaggccctaggggtgtgggctgactaggggtgagggactgcttcaccaggaaactgtttcttcgtcacctggcccagatgacccagcaagagcgccgtcgtcccgttctgtgctctcccgaaatcacaaacgtgactttccgcagagactgtcaccggagcggcaagggggcgtggactacagcaaagcagctacgctttctgccgctgccgccgcgcagccgccgccgctcactggtccgacaagcccaggtccgttcagaaatagctcccgagtgccttttcattagactacccccggaaacggggtcccgggcccgccgcgttccgctgcccgcgctcctcctctgccgcgggctctgtagctgagtggtggctgggtatggaggcgaaggcggcacccaagccagctgcaagcggcgcgtgctcggtgtcggcagaggagaccgaaaagtggat

SEQ ID NO: 13555 - DNA, 904 bp, Homo sapiens
gcctttgttggtcacagatggcccggggatttcctgggatagaaatagccgccggctccggccccttaaagctgcttaaggggcgggatgcggaggggagggtccgggcacaccccacacgtccccggccgagaccccagcctccgcgctgagctcccacccgggagacgccggcagcggcgcaggcctccggttgcttgtgagaaacgacccaagccccaaatcccgaggctggcggtcgtcccctcgcccggcccctcccccaccctaaaggcggcctagagccctgggaaggccccacggcgccgcccgtccggtcctcacgcgcttctccgggcccaggctccggggctccccacagcccggggcaaaggtcacggtcttcccttgcttccccctgggttcccagaagcaggtggagttgcgcagggctgggtcccgacgctgtcgtcaagccaactgttccactgttccttgtctgtcttctctaggggcggaccgcggaacccgaggccatgtcccatgaaaagagttttttggtgtctggggacaactatcctccccccaaccctggatatccgggggggccccagccacccatgcccccctatgctcagcctccctaccctggggccccttacccacagccccctttccagccctccccctacggtcagccagggtacccccatggccccagcccctacccccaagggggctacccacagggtccctacccccaagggggctacccacagggcccctacccacaagagggctacccacagggcccctacccccaagggggctacccccaggggccatatccccagagccccttcccccccaacccctatggacagccacaggtcttcccaggacaagaccctgactgtgagtctca

SEQ ID NO: 13556 - DNA, 903 bp, Homo sapiens
gtgagtgcatgtggaatgagaagcctcccttgggcaggagttaacagccacaatggggaaaggattgggacatctaatcctttgagtgtgtgtgggggccaagggagcagtagtagcaggatgcctgcgcatacagccatgtacacagtgtgtacacagaagtgtaattcttgggcctgaatatttcatagggtagagacatattgagtactttattaagtaagcatattgagtactttattcatctatacaacaagggtcgtctattaagggccacacagtctagctgtttctgtaaagcacattgttttgaattactgttagcagtgtagtatagaaggaaatcgggaatccagattctctatggatttccccctgaacagttatgtggctgtatccttatctagtgaatggtgacattagcttttcccctgctgcacgggctgtagtgaggctcaggtgtgcaggtgcacttactaacatatggaaaagttaagcactgtataaccagaaggtagcccttttactcctattttatatgacagccacgtatgcaaaatatctaatttcttcctgaacactcaattgaacttcaacacttcgtatttttcgtctcagaatttttattttcctcaaatttatattatgtggttaaattcctttgaagtgctagatactttaagattaaaattaaagtaggaatgttttttcttcaattagaagctcttagaacttggcaagtactctgtgttctctcatttccttatctttgtgtatgctgtattgcagcacacgtcacatggagatgggcgtcaagaagttacctctcgtaccagccgctcaggagctcggtgtagaaactctatagcctcctgtgcagatgaacaacctcacatcggaaac

SEQ ID NO: 13557 - DNA, 903 bp, Homo sapiens
cagatggtatgaaaggctggaacctggaggtcccacagtcttggggctttggagaggagcctaatagagcaaaccagcaaggatcggaactaagacattccttcaacaaatgttaattaagcacttattatggctgctgctcagtgctagcagctttggtgtagtgccttttaatcttccagacactttcaaatacaggacctcgtttagatgtgtttcagaagggtggatttatttgttcaccacatacttagtacttaacttttctgtttcctcaacagcaagatgagactaccgagagcttctccttcataattttgtcaaaatgaaataataatctatgtaaagaggcggatgtgctgcctggcatatagtaagagcccaagaaatgttaggtactgctgttgttatcgctgtttaccaggcacagttccaatcataggagagacggtgattgaaccgaacagaggctcaaatgtctgtggcgctctcagtaaacccatgagctttctaaatagaaaagaaactgctcctagcctggccttttctgagaccggtgcgtgtcctcccgggaatccagcgcctggcatcttcgcagggtgctgcgaaggggcgggctgggaggcggggcacggctgggagcgaggcggggcggggaccgtcgcctgctgggaccgccgcctgcttggaccgcagaagagcaggaggacgtctgagccatgctcgcggcgatgggctctctggcggctgccctctgggcagtggtccatcctcggactctcctactgggcactgtcgcctttctgctcgctgctgactttctcaaaagacggcgcccaaagaactacccgccggggccctggcgcctgcccttccttggcaacttcttccttgtggacttcg

SEQ ID NO: 13558 - DNA, 903 bp, Homo sapiens
attgagcaagtgtgaaaagagggttatgcattcaggggtcagcagatggcaggcagagtagcccctccaaatctccctcccataccacaaagccctcttatttattcaaacttaacattagaagctcatttcaagtaggcacgtctgtgtctgggcgtctattttccttctttgtatatagcaggcatttgtcaacttggtgaaaagcattactcttctttccatttctgaggactaattgtgcttcttcgctagacacgagttcaaaacagtgggttgaaagagggcaagtttatgccaaagaatcagaaatagtcataatttagagagaattctagaggtcagttccctttcgtatggactgggcaactgaaacccagacagggaagggaattagaccaagttcacaagcacaaacactttactggcacattcagattggaaatcgagggcttctgctcccaggtcagaactaaatgccctttctagctagggtgttctttgatctcagtgattttgactctttctactgcactctggggacagtgggttctgcggtaccaactccaattaaagtgggaatatgtaccagcccctccccttggtttttatttttcagaggcctggcagtcagagggattctgatctctatatgcaatattttcacactactgtacttattgaaatcacatttgaatcttggcaattaacaaggcagtaattggcatcaggagggtatgttagtttgcttatctgcgccgtccctcctcttcccaacccactgtgtattgcagaatgttttatcagctctgatttgccaagttgctctcttctccagtaggtgctgcgagcagagagggattcctcggaggtcatctgttccatcttcttgcctatgcaaat

SEQ ID NO: 13559 - DNA, 903 bp, Homo sapiens
aagtatgtgggctgtggaatctcccttccaatcgcagtagaactcaatccaggcggtctccggatttctccagaccacctccacctggcgttgttctgagctgggccaccgaaagttgagattactgaatgtgtgtgtctcccattaacccgtaagccctccaaaggctgcatctaagtcgcctctgaattattcacattcctccaaactctgggccacagccccgcaatatgggcttattgaattagcccaaagagacacaaagcagcctctacgcagctggtttcacaaaggggggcggtcctaaccctgcgctctgggatcctgacgttcgagctatctctcctcctcccctctgctcccagctctccgcagtccagcttgtcggctgatcatcgtccatagaggccaccgtacccgacgtttgcggacagtgacaaagagtcaagcttggtggagcctgaggacaggactgaatgacgattgaactgagagttcaggggcggagtttgagggcgaactcgggacagagactggatagagttcagggaggcgggacctaatgatggcgcagggaggggattgggctgagggcggtgccggcgcgaggattgggccgagcgcctcgggggcggtccttgagggggcggtgccgtgtcggaagtcaaaggtcagtaaatagtggtgatgtcatgcaggcaagatggcggaagggtgagcttgtcgttttgctcctaggcgttggggcctgaattctcccagggttggggtgctgggcgagagtcccggtggggaacgtgagatcagcgggggcgtggactgatctgaaagggcagagtggagtcgcattgtgagggggtgggcaagcggtctgcgaagcctcggcccgcagggtacatctga

SEQ ID NO: 13560 - DNA, 902 bp, Homo sapiens
aggaggtaaattcgtccctgaaggtgagtgatcacttccctcaaagaagccagcatctctggcacatcctgggcctttctagattgttataaccccctcctcctgccattgttcacctaccgccacctctaggcttcaaagttcgagaaatgcgaggcaaactggccattggcatcacagccaactttgtgaatggacgcaccgtggaggagacacaggtgccggagatcagtggtgtagccaggatctacaaccagagcttcttccagagccttctcaaagccacaggtcagggaccctcttgctgaatttcccctccccctgcctgactgtggcctggctcctgcctctcccttccaaacttgtcctcactgcaaggaactccacacttttctgtttttttggtctcagcagcaaaggagaaggaacctgtcccctcagggattaagcaagcacagccctagttgatcacccagcatgaaaagtcctggaatctctcagagatgaacctgtgtatgggagttttgcttaagtggtacttcaagaaggtgcctctgtttactttggttttgcactgccatgcgaccaggtggtgcaggtctcccaaatgccacccccctccaagcttccctctttgctctaagtcctcaggcctcctgggcctgggacagatggttgtttgtgtcatcaggactcgtggggttctatgcgtggagcactcaccgcagcctaagctgggatcccagctcagaggtcaggccatgttgggatgtttagggaaggtgatgcattatcaggagacatatctactgtcccctgccctgtacccccaggcattgatctggagaacattgtgtactacaaggacgacacccactactttgtgatgacagccaagaagc

SEQ ID NO: 13561 - DNA, 901 bp, Homo sapiens
gaacaggttttgccatcaagttcattcattcttggtttttaaatcccaacattaaaataagcaaacattgccacaacaaatgttttctcttgtgaagccataagagaacaggagaatccaagttaagcaaagatagcaaagcttgctcttgtcaattaaaagtgcaattggcctatctatttgaaagtgaaatctttattatggaaagtcagatttcaggaaaaaaatccataacataactgtttcagtaaattactcaggtcctattttcattaagttgtattatcataatagctgagagttcatttgccattgtacccaactcatctaaaattctgaatccccagtgactggattatatttgacttcaaaaagaacactatgtcctgctagccttatgtaatacaaagtaaatcaagtcactgagttttcacccatggatataacattccagttcattttaattacatataaaatgtatattaagtaaatatatatattagcctgccttttgatgaaggcaactgacttatgacaatagcatacagttaatattcgcctttgttcctgaaatatctttgttataaacatagtttctatactttgaaagccaaattcaccaagggaagcatcttctaaatcttactgctgtaagctcattttcctggactgttattatacgtaataagagacttgacttgacagctcctataataacacattctaaattttaaattcgatgtgtgttttttaccttaaactcttgtgatgacaaaaccattttcctcaaagctgattggttatgcaggtctacaacagtgcttaaatggaaccttgctgtgccaagctttctgacaaggaggaatctttttattttgagcctttttgatactgaacatga

SEQ ID NO: 13562 - DNA, 901 bp, Homo sapiens
taccccctgcaagagagactaaaagagcattcagaattagtctagacgcagtgtactgtaactacttggccggccacctgtaacagaggggaggagggtctgcacttagttgcggcagttatccggagaatacggccttccagcccctctgccaccagactccccacgccccaggtacgcgccccgcggagagacccagcgcgtgctcgtgcgcaggcgcagggcgactgtcacccggagtctgtggtttgtcgcccggcgctctggtgtctcgatgtagttcccctggcttctccttatccgcctcgggcaggggggtcgccactgccccttctccaggctctctccaacccctgcccaggctaagcccggcgcggccctactctctgaccccgcgttgcacaatgcccgagcaaagtctccaggggtgtgaaccccggcgtccctgcccctgggcggggacaggcggcggccaagcggggagtcgaggcggcgagcgcgcagctggcctagtctgcggtccccaactcctggagtcccctgggagctgccgctgcaggcccccgagccgctaggccccgccgccaggccaccgctgctgcggcagccatggcggaagttcatagacgtcagcatgctcgggttaaaggagaagcccccgcgaaatcctccacactccgagatgaggaggagctggggatggcgtcggccgaaacgctgaccgtgtttctgaagctgctggccgccggcttttacggcgtgagctccttcctgatcgtggtggtgaataagagcgtgctcaccaattacaggtagggccgaggcggcggcggcccaggccgcggaggaggagcgggcggcggcggcggcgcggcgccggctccctggactttgactgcca

SEQ ID NO: 13563 - DNA, 901 bp, Homo sapiens
gagaagagttgtttctggggtgacgtgggagcctgtgtgccagggcactggcccgcaagggtaagaacccggcgggctcccgcagcctaacagggagctgcctctgtcacgtgcctgcgaggtgggacacaagttggcttacaagttggttcgacatagccaaatccgcgtgccgcatttccacgctatggagtgctagtcttcatgattgtgccccttgacatgacacaataggaatagaagccgggaggccaagcaaaggccctctttgggggtgggggcgcggcggcatgtgaccctcgccgcctgtggggaagacctgccttgaggacagagcgccaggggtgcagaggccgcctgggactgcccggaggccggtggggagcgcgccagcgaaagcccgtgcgccctcggagccggggaaggcgcgggccatgacccgggttcgcccgcaaaggccgggcagtgccgcaaggcgtgggggcgcccccgcccggtggccccggggctggtgcgaccctgggcacgccggggccggggccggagccgggggtcgcggcggccggggagggggaggagccgcgcggctccgccggcgccccgcgggccagggaaagtgaaagggcggcggggcctcccgcgcgccgctccaggaagtcgcgagcaggaagcgcccgcggcggccgggccgggctgggctgcggagcgcgggcctcggcggcgcaggtgaggcgcggggccggggccggaccgggaggcggggaccccccgcccccccgcccgcacctgcggggcagccggcgctcaggcgccgcagccgctcagcacctgcggcgccctcagggagccgggcgcggggccctgcgcactcggagctcggctcctctccttccttttcttt

SEQ ID NO: 13564 - DNA, 901 bp, Homo sapiens
cagaaaaagatcctctctcatgacctgattttgtttgagattacatgtccaccacacgcacacaatgggccacttagtctggcctctctgagtgaggagtatcctcctcctacctacgcaaacatgaaacctaacagaggattcagtgttaatttgtctcttaaagacaattctgcattaagaaatggattactttgctataacctcagcatataaaaagtctaaagaatctgtgcattctgagtttgtgtatttttggtctcaggctgtgatttatctgaaaggccttggagagaaagatataggcctttacctagaccaaaatcaggttgaaacaataaaggtattttatgctttgtgtaagctggtaaataccatgacttttggaataacagtcttgctgaaaaattgacacacttttccttctggtatgtctttgcataaattgttcctctttctgcaagattaactgataccatctgtgagtattctatccccactctcagcttgcatttaaatctgcatgtttcctttctctgcctcttttcaaaggtgctagaatacaagagctacccttagctaatggccaaacactccgtctgagttccctttcttttaaccccttgcttccaactctgcatctaaaggcaaaaacaatcctctgactcacggccctccccctgcctgtgataggctgcttggaatagcaacagcctgtgtcaccgaaaagggcaaagccttcggaaatagaaacaaagttggtcacaaatcacattagctttgcccgaagtttttccccacactcttctttagcatgctattatggggaaagtgaccactcctgggagcgggggtggtcggggcggtttggtggcggggaagcggctgtaacttctacgtg

SEQ ID NO: 13565 - DNA, 900 bp, Homo sapiens
agggcaacaaagaatgattcaaaggcaagagaatctatcctatgggatatatccaaaaaggcttcattgaagatgtcaacttggggataactttgaaaggcaggatcttagagagggaggaatgtatcatggaaagaggaaatagaaatgtcttggatcagcctgtgtcccctttcactataagagcctgaaacaatgtggcttgtctgtaatagacacgtgaatctccactcacgaattgagggactccagtttgtaatttatgtcccctacagcctacctttccttttctgccctgtgcttaacctagtacattgtgatgaaaggtgggacctggccaacatagtttcttcccccaaaatcgaaacattcaactttaggttaaaggtggacactttccctagtatatctaatgatgggctgaggctcagagctttgcagctaagctctggccttattgacttaaatcattttaatgacactttaatattaaagagtcactgggcccagtgtctgtgaaatgctctctgtgccctgcctctgctagagcagacactgtgtgcaggaaagaagacaagagaatgtaggacaagtcctactggccttgcaaaggtcccaccccctagtccctgtgacgcatccagtgcaggtgacatgttctctaaggtgtggataggcaattaatttcatggagagtaggaggtgtgggttcagctgctgcttttttttttttttcagtgaggcattatctgaatgatgctcattctctcttgagtctggacttcgtgcaacaagcagcaactggatattattttaaaataagcataagccacccaaagatactgatctgggtccttcttttggaagaagagttgattgagaagtgcctcttggttaagg

SEQ ID NO: 13566 - DNA, 900 bp, Homo sapiens
tgcagccctagaataataagggaaaacagtgtgtcccaaaatggcattatttgtccgtggggcaggtatgtttgaatttccatccatccatctatctatctgagactggggtctcgctatgctgcttggactgttctcgaactcctgggctcaggccatcctcctgggatctaccggcgcgcagagactacgggcgcgcagggactaccgaggcgcgcaaccgtgcccggctccccacctcttcaagaaatggagattgcaatgcttgtgccaactagtaagcttacacagttgtgagcgaatactccacgtgagaggttataaatgacgttgcactaagggagggatggatccttaacgcaagtcaggccacaaaagcgtaccaaaacgcaactgtgcgtctgcaccagcgcgcctgcgtgcaaaggccagccgaagcagagagcagtgcacatgcgtgcagctaccagcatatgggcgtggcgaatagcgccggctaggtcttccaacctctaggtggggtgccagccggggcgggcccagcaccccggccgggcagtactttttttttttttgcatacaccagttctcaggatatcggaatccggtgcacagcagcttcttcaggtttgaggttccggatgcctgggggcggagaaacgggaggggaaaaacagatggcaaggtgggtgaccagcgtccagaaatccactggggaaacctcctcccgtttttacccttggtaccgcgagaatgggcggggtctggcttcggggcggaagcgacgggcggtcccggttccagggcggggctggagacagggagacccggctgggaagtgcaggcaaagccggctgttaccctgcacagccgtcaccctcaactttcccttcaggtgag

SEQ ID NO: 13567 - DNA, 900 bp, Homo sapiens
tttcttggtttgtgtctctgctgcaagtccaaggagctggggcaataccttgagtctgggttcttcgtccccagggacctgggggagccccagcaatgctcagggaaaggggagagcaaagtgtggggttggttctctctagtggtcagtgttggaactgcatccagctgactcaggctgacccaggagtcctcagcagaagtggaattcaggactgaatcgtgctcacaacccccacaatctattggctgtgcttggccccttttcccaacacacacattctgtctggtgggtggaggttaaacatgcggggaggaggaaagggataggatagagaatgggatgtggtcggtagggggtctcaaggactggctatcctgacatccttcgccgcgtgcaggttggccaccatggcctgcggccagagggcacccacgtgacccttaaagagaggacaagttgggtggtatctctggctgacactctgtgcacaaccctcacaacactggtgacggtgggaagggaaagatgacaagccagggggcatgatcccagcatgtgtgggaggagcttctaaattatccattagcacaagcccgtcagtggccccatgcataaatgtacacagaaacaggtggggtcaacagtgggagagaaggggccagggtataaaaagggcccacaagagaccagctcaaggatcccaaggcccaactccccgaaccactcagggtcctgtggacagctcacctagctgcaatggctacaggtaagcgcccctaaaatccctttgggcacaatgtgtcctgaggggagaggcagcgacctgtagatgggacgggggcactaaccctcaggtttggggcttctgaatgtgagtatcgccatgtaagcccagta

SEQ ID NO: 13568 - DNA, 900 bp, Homo sapiens
ccaccagtacttatccagaagcgaatacatggggtcctttactatgttgaacacagagatgatgaattatacattctcactaatgttggagaacctacagaatttaaggtaatcctggatgctcgttgttcctatttgggctgttaagaagtgtcacacttcgatcaacaacatttcttgctccaagagctcattgttttataaattgatgccaccttcctatgtataaccaatcccatttcttttcccttagagctaatgcctctacatattttaattgtgcctaaaaagttagtaaataaaacatattctgtcctgagtttatgttaacaaaatcaaacttagtagcttaaaagagcaaacttacaaactcgtgattttatgagttggcaatttggattgatctcagctaggcagttcttctgctgatatcagctaagctcactgatgtatctgtagtcagctagctgtcagtgccctcactcaaatgtccagtggttggctaagcactggatatactgtctcaccacccagcaggctagtcaggactcattcatatggttgatggtcacactttatccctgatgcagcgttagttccttcagctcttcataaaacagtgaggactagtatggtctagttctcagtgattgcatctctggatgctgcagccttcgtgttttcttacctatatgtcttctaactttgttccacgtagctaatgagaacagcggctgatacccctgcaattatgaattgggatttattttttacaatgaagagaaatacaaaagtgatagacttggacatgtttaaggatcactgtgttctatttctgaagcacagcaatctcctttatgttaatgtgattggtctggctgatgattcagttcggtctct

SEQ ID NO: 13569 - DNA, 900 bp, Homo sapiens
acccacccgtagaaccgaccttgcggggccttcgccgcacacaagctcgtgtctgtgggtccgtgtcgggggctcaccatcgcggctggggcctccccggccctccccctcatccctggtcctcctggtccctgtctgtctgtctgtcgggtctgtccacctgccgcgccccccgggctgaggtaggaggttgtatagttgaggaggacacccaaggagatcactatacggcctcctagctttccccaggctgcgccctgcacgggacggggcccggcggggacccccagccccactcagggacccttagccccactgggctgccccagggaccctgggaggaagagccgggctcttttctgtccttgtccctgcatcccctccttcccctgaaatctgttttccttccctgtctgtctccatctctgctgtgtctctgtggcttctgtgtctctttcacagtggatcctctgactccctcttattctggctttctaggtctctgcccctcccgatatctctctgtgtctctatttctgtcgtttttggtctttctgtctctggctctcagaatgtctctgtgcctatctccatctctgacccccaccccagggtctaccgggccaccgcacaccatgttgccagtctctaggtccctgagaccctttaacctgtgaggacatccagggtcacaggtgaggttcttgggagcctggcgtctggcccaaccacacacctggggaattgctggcctgacttctgacccctgactcctcatacccttcctccagagcatgacatttgaccaccaactgaaacctgacctctgaccccagaccactggcccttcccccgccctgtggtgacttcataaaggttactagcttctcccctggcctt

SEQ ID NO: 13570 - DNA, 900 bp, Homo sapiens
tctggagagaagaaacacaaccccacaggccccgcctgcctctcctgcagtcttgaggccccagggaaagcccccactgcaggcagggggtgggtgcccgagcgagggtgtggggtgagcagggtcctgggcatgtcagggctgcgtgggactccagcgggccgggtgcctctcgccctgcaggacgtggctggcctggtctgcccccagctgagcctcacctgagggagagctggggtgggccgcctcgtttacgaccgtgtagtcgtcttttgcacacaaagccatgtgagtccgtacgtgagtcctgtggaaagacaagacatggaataggagtgacgtccgtccccaggcatgaagtggagagcatcacgctgtgtgagttaaacactggccaagcacggtgtgagtcggagccggggacctggccagatgagggctgcgtgcagctttcacaccccaggcacgtgagcaccgccaagcccagcctcagccagcagctgctctgcaatgtggagtcaccagtggccccaaggatggcaggtgggggtggccttgggactgaattaggccgacacccaaggcctctgttccttcccgtcccttctctcccttcggaggatcaaatgagagtttctaggaaagaaaacatggccaggccctcctccagcgcccaggcagggctcgagcggacgcccgtgtgacccccacatcccttctacccctgtagctctctgactctgatatcccagtgggaggaacgaggaggggacgggtgaggaggaggaagaggaggagacatgagggttaggaggagcacatcctgagtttgtgaggcttcactgacctctggcctcacaaacacacacaggcctgagctccggatatttctcctgttct

SEQ ID NO: 13571 - DNA, 900 bp, Homo sapiens
gtacgttcttctttgtttccggcttccccccaccgcactttacatattcttagcttttttggacatctttagacgtcaaaaaaaaaaaaaagtatttttaacagtcacatagtgttgatgtgccataatttatttgcctacagtaatttttgaattataggttgtttgcaatttttcaccaaaaaaaaaaatgtgtttaaacaaaatgaatggtacagccatgtcattactcaaattcagagagctcttcagggaagaggcgatcacagctgagaggaggccagctagggagctgagtgggtgtaagtgttatatccaatggagactgcaggaaaaatgagccctggggctctgtgcctgtggaggtggctgtgtgaaggtgggaagctgctctgccccgactagcgactgctccttccgatgttttgaatttaaagatggtgaaatctcaatctgaaggactagagatgggcgctagcgttcctgacctctgccctgttgtcctgcacaaactagaaattatgttctgggtccttgtctttttttgggggggggcgggggtcggagttttgctctgtcccccaagctggagtgcagtggcgcgatcttggctaactgcaacgtctgcctcccgggttttcaagcgattttcctgcctcagccttccgagtagctgggattacaggcgcgcaccaccacgcctggctaatttctgtatttttaatagagacgggtttcaccatgttggccaggctggtctcgaactcctgacctcaggtgatccgcccgcctcagcctcccaaagtgctggaattataggcgtgagcccaccgagcttggctgggtccttgtcttgaaatgtgtctctgagccattagccagaagggggcaaagaggcct

SEQ ID NO: 13572 - DNA, 900 bp, Homo sapiens
agactcactgctagactctcggctcagcctggcatggtggctcacacctgtaatctcagcactttgggagactgaggcgggcagatcacctgaggtcaggagttggagaccagcctggccaacatggtgaaaccccgtctctactaaaaatacaaaaattagccaggtgtggtggtgcatgcctgtaatcccagctactcgggaggctgatgcaggagaatcacttgaacccaggaggtggaggttgcagtgagccaagaccgcgccccactgtactccagcctgagcaacagagcgagactttgtcccattaaaaaaaaaaaaaaaaaaaaaaaaaaaagactcactgctttagagagaaggccaaaagctcacactgaatataaatgatttaactcacctaataatgaaagaggatctcagattggatatatgaatgaaatagagctatatccaagcttaaggatgggaatacttgtaatggagaggttgaaaatgaaaaagtgggagacgttttcgtaagcatgttaggtccggttatgcagttcactgctgccctacacattccaatttggggaagtgactggaggttaaaggtcatgagaattcagttctggaatatagaggaagataacggtggagtgatgtattccaggagagcgtgtggttgatgggaaagtttggagtcttcatcatgctgttagcaggcagcagatgtttcatttcgaggatgtctgtgaaaagacaagcatccttggccatgtggactgacttgattttaaagtgaggtttggggctggtggcaggtaagctgctttcttctattctttttgcttgtataaaatagaaggcatgggaagatggcggcgggggcgaggtgagatgttggcagtggaaagg

SEQ ID NO: 13573 - DNA, 884 bp, Homo sapiens
actttggaaggccaaggttagaggattgcttgagcccagaagttcaagaccagcctacgcaacatggcaagaaactttctctacaaaaaaacaaaaaaaaattttttttttgagacagggtttcactctgtcaccaggctggagagcagtggcaggatctcagctcactgcaacctctgcctcctgggcttaagtgtttctgctgcctcagcctcccaggtagctgggattataggcacgtgccaccacgctcagctaatttttgtacttcttagtagagactgtgtttcaccatgttagccaggctggtctccaactcttgacctcagataatccacctgccttggcgtgagccacagctcctggccaaaaaaaaaatttttttttaattaggcaggtgtggtggcacatgcttcaagtccaagcgatttgagaggctgaggtgggaggattgcttatgcccaggagatcgatgatgcagtgagctattgtagtgccactgccctccagcatgggcaacagagtaagaccctgtctcaaaaaataaaaataaaaataaatccaagccttttgactccacagccactctttgtattgtacgtcagggacaggaggagcttgccgttaattgcttctgggaacctagatactaggttacactgtctttaaatttaattttctctgttccttgctcttacaggataactataatgggatgagctttgtctgtattggggctatcttggtctttgtagccttctttgaaattggaccaggccccattccctggtttattgtggccgaactcttcagccagggcccccgcccagctgcgatggcagtggccggctgctccaactggacctccaacttcctagtcggat

SEQ ID NO: 13574 - DNA, 865 bp, Homo sapiens
agacaggacacagtagcagggacaagctgcataagggataaaaattgcttccctcctttgtttgggtgtgctgttgccattgtttcacctgtgaggagcaccctttctgcagaaagtaaaattgccttgctgaaaacactttttgtctaaatgctgatttttccttgcagtactgaggagcaagcattctgtttctaaataaacactttacttataacaagcccactttaaattatgtattagaacacattgagtccacttggaaaagccgattaagtcttgggctgctgtggttcctgagcatgagctttgttaagctttgtcaagtcttcctaaatactatgccaggagtttcttttgaccagatgattcctgcttattgctttgatcctggcttcatatctagatattatagatgtcctacactttttctgagaacatttgtgtgaattgaaagttggataaatcatatgtaaaatgcatgaggcatgtgtgtagggtaaaagttatagggggtggatgtcagtggcaggaagattcaaagttgagatgtttttcttcttagcaagctaagaatctaccttctataacttctagccattgcatcttctttttcatctagaggaatgtttcctccagagtgtatatgctgcaaagtggtagttctgaagatgtcaataaataccatgtaggaaaaaaaagtgggtgggttctggagttgaataaatgtgggaaaaaactggattcaagaaagataaacaggtttctttaatgctgggctcttggagatgctaatgtgtactgaacatagtaaatctctagggagtatggtttgttcctaaatctaatcgagctcccaaggaac

SEQ ID NO: 13575 - DNA, 847 bp, Homo sapiens
cactattgtcctatgaccctgccaaatccccctctgcgagaaacacccaagaatgatcaataaaaaaaaaataaataaattaaaaaaaaaaaagaaaaaaattaacctatcaaaataaaatatcagcagttgaaactaacaatgtattaataacaataatattatgaccaagttgcgtctaccccaagaattcaagaatggtttaccattagaaagtttattgatgtaactgatctcattaacagattaaaggagaatacccatatgatcatcttaatagatgcacgaaaagcatgcaataaaatacctatttattataactgctaatattttgtgtttttccttaaaaatgcagtgtttttaggaattaaagttcagagcagcaaaagtcaaacaaaaaccaagtctgagcaatagagctactacagtgcccatcacagtgtctgctcaggtgacttcttaaggtcatgtccagctctatgtttctgtgaccacaaatagcatctttggcaagtctagtttcagttggtctttgtccagctcctggattcctccatgcagggcctgagaagccctgagggataaaagattaatccggttcagtggactctgtggttcctcaactccaagtgcccccagcataagtcggacctgcctctcacgcaatggatcccctggcggcaacccgagaccggttctcctacccgcattccgccaagtctctcgctctgcccaggacgcacagatgagagcgctccgaagactggtgggtctatctttcggtctttcctaattttcccgtcctctggggaaaggtcggggatacctgaaccaaagtgtgtgtgtg

SEQ ID NO: 13576 - DNA, 846 bp, Homo sapiens
cctccgtgtttgacttccttatgaagtagagaccaggtagtttggacactatgttctttcacaaaagggatttcattttgtgaaatatttgaaagcatcgaagtctagcatttcacgttttgcaagctggggaaaagcattcattccctgagaagcagcgttggtctgtcaggcttggagttccccgggttgtgggttttagggaagggaagggaagcgaggaaggacttgtgagaggaagtcctaaaggccacttaagggcacacagaggcccggagctggctttgctcagagcttgtagcggcgccacaatctctgtcctctcaggaacaggaactggcttgacgtccttttcctgccctatccaagcccctgttcttgcagcccttctgaagctcagcctggcaccggccccggcgccccagcccctggccaagcctctgctgtcatttctcctccctcctctcagtctgcagctgcgggacgggccgggctcctcagtttctgctgtgttgtgaccccacgaggcgctcagcacccagggaaggcgcgtgtgtccccgatgctggctcctccctgagccccgacggctctcgaggttctgagcctgtggcctgcacagggaacttcctctccgactgcatttatgcctctgtggatgtgaaggctatttctagaaatctcttcctttgcagaaacacccgaaaccctcctgccaggaagaccagggcctgggaagagggtcgctctccggccattctcccctcaccctcctcaccttcctcacatcctgtgccctgggggaccagcagctgcttccacccaggtgagagatggagggataga

SEQ ID NO: 13577 - DNA, 831 bp, Homo sapiens
caaacaaacaaaatccccaaaaagcaaaagtgtctgcatggacttgtgcctaactactcacagtggctacttcttgggggaggtgaaaggggaccctgttaaagaatttttcttctgtattgtttttcttcaactgagtctgcattaattttatatttaatactctccccacccctgatgctcacaggttgctttagctggtggaaggagaacctgcacctctggttttggcaaagtgtagaaggggacaagggcactgctctgcacctgcacaggttcttgcctcctggggtcagtttaatgaatctcagtggtgtttcttgggaagaacacagtggacactcacttgccagtcagtagacaaatcactgaagtccatgtctggcagttctcaatgtcatggggactgtaaggttgtcatgtctcacagttccctgacttagaagattagtggtgacagacacttctcagctctgctcgggagagcagctctgtaatgcgcttgtggtttcagatgtgggcggcctgtgtgaacctgtcgtgcaaagctcacgtcaccaactgctgcagttatctcctgaatcaggctgagggtctttgctgtgcacccagagatagttgggtgacaaatcacctccaggttggggatgcctcagacttgtgatgggactgggcagatgcatctgggaaggtgagtctgtgctttgggcttcccaacctctcaagtcagcatgaaattcagaaggcagagagggacatgtggccctccaactcggggcccagggagccactgtggcatttgagagcgccaccctagctttacctcctctg

SEQ ID NO: 13578 - DNA, 815 bp, Homo sapiens
cctgatagttggtctggctcctagaaattcagattttcttccctccaggtgagattatgcgaagaaaggaacactggcaaaattatttccctgattttcttctctcaggctgtctttccctcccctttaagattgtgtactccgtctcaaaaaaaaaagaaaaaaaaaagattgtagacccagcctataaattcataggatcaagaattcttactaacactctttctaacaaccttaaatctctgatagtagcacccacttgacttcgttttgtatggatagatttattctaatctctctgtagattgttttaatcccaagcagatgcgagagcataaaatagtgtatttgccctccctccaggcttttctggtagtattttgtctgtgaaactaagaggctctagctgctattagaagagggaaggagtaaggatgagcttttgaaaaaaaaaaaaaaaaaaaaacccagggtggagagagtggaaggatgtggttttaagagaggggggagggagggcgttattgtctgtggggcgggggcgggggtagttctgataacacagaattccgagagatcacaagattgcttcaggggggtggggtggggtggggtggggctgggggcttgtcgccctttcaggctccaccctttgcggagattataaatagtcatgatcccagcgagacccagagatgctgtaatggtaagactttggatccttcctgaggacgtggagaaaacttgctgctgagaaggacattttgaaggttttgttggctgaaaaagctgtttctggaatcacccctagatct

SEQ ID NO: 13579 - DNA, 812 bp, Homo sapiens
cagtgtctgtggagaggtatctcatattatgaaatatttcaaacgtacagaaaacgaaccacctactatccaaatatttcaaatgttaatattgcataatatttgtttttagtaaaacttttaagacacaggtgaaaactcatgttacccctctccaatcttgtttccttctctcctccgtaggagtaaccgcaattcacaatttcacaatttgtaattcccatacgtgtttttttgatgttactacatatgtctgtatccataactattacacaagattttacaacttacaattttcaacaacactgacatataatcatactatatttcgaaagaaatacatgggagtttttgaagctaactattcatatatagtcgtattaatatttcaaatttgtttcttcattagattctgtatgattggatccaactgtagtctcattcatttccacttcttgcactactagtctacatatttgtgggttctttctgagcctccactgtcatattacgagagtttcagacaaattctgcaatgtcatatgacctgaactttggaattgacttaattgctaaataggaaaactcagaaggctaggtttcagcaagacagtgatgtactctgtctctatgtcatcccatggaggggtgtgccagtgcgagggtatctgctaggcactgcggattctattccagtgcagagtaccttctctgtcccacgggtctgtattcttatagaacaaggggaggaaactgaccttggtgagggtggctgataatatagtatccttggacttgggtaatctgcattt

SEQ ID NO: 13580 - DNA, 811 bp, Homo sapiens
agagcttgcagtgagctgagattgcgccaccgcactccagcctgggcgacaaagcgagactccacctcaaaaaaaaaaaaaaaaaaaaaaaaaagctgggtgtggcggcacgtgcctataatcccggctacttgggaagctaaggcaggagaatagcttgagcccaggaagccgaggttgcagtgagctgagattgcgccactgcactccagcctgggcaacaaaggaagaccctgtctcaaaaaaaaaagaggcatacatggaaaaatgacacagaaaaagcatcctagatccaggtcacagcctcactgggtctctgaaagtcctcatttctgcggaccaatgtcaggcaatgttttttctctctccttggtgcaactagggagctttcggcttggggcttggtgggtgcaaagacgaaattcgtgctgtgtatgatttgtgcactggcaacgtgtgtcttatcaacatttccaaggagaatttgctcctggggaaagtcagcagggtccagagagcaaaaggatcataaagccaggtaggcccaggggagaaacagccggtctttaggtggctggcgcagagcaggtgtcacttgggaggtagagcacacctgttctcccacctgaacaaggatggagaacaaagaggcgggaacccctccacccattccatccagggagggggtaagtgccaagactaggaacctgtcactgtccctctcccaccagctgtgcagacctgtggagggaggtgaaggccgtggaatgcttttagcaaggagcgggtagcgtgcttcctttttcttcag

SEQ ID NO: 13581 - DNA, 807 bp, Homo sapiens
ataggctggaaagagaaagcctgaaaacaacaataatgatattaataaattagtttacttctctagtctcatatacttctgtgcccacacttgctcctgttctattcataatggtccccttgcagttgccatattatatcctgccatttgatgcccggtgaacattctatacctgcttcccagaattctctttacctttcctctatctgcctaacttccacatatctaaaattaatcagagtaaactatttactagaacaaccaactccaaatcctagtaacctaacatgataaaggtttgtttctcactcatatagcccctccccagatgatcgaggggtccaggctccttacctctagtggctcccccaccttctggagtcttctgcattctttatacatggttgagataaactatgagtcattagcacagctagaccttgaggtcctacaagaaaatttgcaaatcattcactctgttttgaacaaggtatatttaagatgatgttaaaatacccaatggtcttgggtcaaatacagtttatgactgtgtatctaaaatatatattgcaatattcttccctttttctactgacttcatgaatttagcggggatccattttataagctcaaagataattacttttcagactaagaatatttagggtaaaaagtactgttcaacatctctactgaggatgttatgatgtagcacactgtataagctggagctaaaggaaactttccttaaagtgctatttactaaaaattggaacacattccttaagacaaatcgaagtgtggcac

SEQ ID NO: 13582 - DNA, 800 bp, Homo sapiens
acactccaatttcagcagtttggctcctaaggaaatttctggtttccttctgtggattgtgggtatttgcctggtgattattactgcttctatcatttccatgtattccctagcgcaagatatatgtggtgtctgcagggaggagcgtgggcatgggagtggtgggacagccccccaggctgcaccacactgggtatggctgttggcagtccacagggtgtcaggtggcacatgccaccaccccaggcagacatcctgtgacttacctctgaaaacatccctgtccctgaagtcacctggcaaagagggtcaggcttggaaggtcctcgggggtaggaggagtagaaatttggcttcaggctcgtgtgagctccattctggctccccagccagaactaccctggcgggtggaaacagcttttaccgcgtgtggctgtcgcatgtggttttggaattttccaacgccccctacgattggctgcccctcccctcacaccctgccccaggcccagattggccacgtggggcgcctgtcatcctactcactgcaccccttgggggtggggtggggggttgtcacttggccacctgtgtggtgcagagcttaaaccccccagtccagaagcactgggggagagagctaggtgcagagcttcaggctgaggcgctgctgagagggcctcgccccgcctctgccgccagctgcaccccactcctggaccaccccctgctgagaaggacagggagccaaggccggcagagccaaggctcagtcatgagaagtaagtgaatggggccac

SEQ ID NO: 13583 - DNA, 783 bp, Homo sapiens
acgcgttcagagaggcccatccaaatgccaggagacagacggcaaggatgcttaagaggagacgtgactgggcgaggcagatgaggagagggccgtgggccaaggtcacccgctaagaggcggcaggtttaccactgagacacgaggccgtggtttttgcccgtgcctccagaaagagcgtggcgagatccccgcagaacccaggcgtgggaggccctggggaagagccacgaggcccgactctagtggctcaggggccctgggcagcggcgcgccaccgctcgccccaccctcagccgctctcctcttccgggcgcgctgcttgcctgcgtgcgccgggacgcgcggggccgagcgtctgaagcgcgcccgtacgcggagcggcgctttctaggagccccgccctcaggtgcgctctgcaggaggcggggcgcgacttcggcgccgccagctctgcctgcgccaggagcgcgcgggtgcgcgcggccgcgccctcgcacagatcccagctgggtcacccgcactgagtcaacagactgagcgcgtccaggcctgacagctctgcggctcgggccctgaggtgaggcgggcgtcgcgggcggcggcggcgcttgaggctagcctgggacagccgtccctgggggagttgaggggacgaggaggggctggccagcgagggacggcggggagagaaggggagttcggcgtctgaggtgtggggtgaagcgggctcggaagcgggcagaggcggcgagctgagggaaacagacctccctcagctcc

SEQ ID NO: 13584 - DNA, 770 bp, Homo sapiens
ctttgcgcatctcctcttacatttctcatgtttgagcatccatgaattcttagatcaaatcctttgtctacttttcacttgggttacctgttcgttctcttgtagatttgcaggaattcctaacatattcagatattgttctggatatctatctatctatctatctatctatctatctatctatcttaggcatcttctctgaatctcttatctctcattggaatgttaattgggtccactgtatcttttactgcacagaaatccttaatttgcatgcgtatttatcctttatattttatcttgtttaagcttttggggttttaagaattcctactcttaagtcacaaaaatttctcctatgttatcatcttttaacattataattttacctttctcataaaggaaaagactccaccttgtatatgcagtagacaagaacctgtttctctctgttcccacatttccagtggtctgaacaacttccaccacactatccattctccaggggcgtgtggaccttcctttagcagatgttaagtttccccctattcacaggcctgattctgagctctctactctgttctatggatctgtttttctgttcttgcagcagtcccacagtttttttaaaattattttatttttattagtatgcatttgtaatatctcttaatatctggaagcttgggttctccttcttcaatcttttatttaaaaattgacctagcttggatagggcatggtggcttatgcctgtaatcccagcactt

SEQ ID NO: 13585 - DNA, 761 bp, Homo sapiens
tggatctttcctgctttctcttgtgggcatttagtgctataaatttccctctacacactgctttgaatgtgttccagagattctggtatgctgtgtctttgttctcgttggtttcaagaacatctttatttctgccttcattttgttacgtacccagtagtcattcaggagcaggttgctcagtttccatgtaattgagcggttttgagtgagtttcttaatcctgagttctagtttgattgcactaaaatttttaaaaagtaaaaaaaatacatgtggtttaatacaattcatgccaactcattccctcgttttttgctataaaccttgcaaggagatgaataatccaaggctcttggataagataagggccccatccatcttgctcctctcagccctggaggaggagggagagtccttttcccctgtctacgctcatgcacccccaatgagtccctgcctccagccctgacctctgccctcggtctctcaggcagatccagggccagttctcccatgacgtgatccctctcgaaggcaaggcaccaggcaagataaaaggattgcagctgaacagggtggagggagcattggaatggcactcagggcaaaggcagaggtgtgcatggcagtgccctggctgtccctgcaaagggcacaggcactgggcacgagagccgcccgggtccccaggacagtgctgccctttgaagccatgccccggcgtccaggcaacaggtggctgaggctgctgcagatct

SEQ ID NO: 13586 - DNA, 753 bp, Homo sapiens
ctcagctaggacggtcttcatgtttcttggggtgagtgaataggtgatcccgttgggtcaggtggggtgggaatgtgggtgtgactgggcttcgggtggcgtttcttctcccgcagacatggctgggcttgtttggtacttctccctccatgtcctccgctgccaccctcctcctgtccccgtccttcaggacagaaccagcaaatcagtctcagccccttaagagcacctttactggtgctttctttccctaggattttttttctcttttttcatttttttccatttaaactcagtggcaaaaatcccaaggacttttgatccaaaggcggcagttatcactaagtggtttatttccttctaagacctagccaacggtctcagagccaatgctgctggtacaactactctattaatgggatagttttggtaagtctggatcctcccagctgggtcctcctgatcagtgcaaagcagccttttgttttaaaacacattgcaagcaatggcttgggaagtaaacaccatctgaggctcgctggccagaggcaaggggagacggcaggcagttgagcctgcctgagggttctctcagcagtgacttcctttttcccttccttcttctgcctagtcctgtatgtgaggactattaattgttttttgttgttgttgttgtttgttttgtgagatggagtctccctctgttgcccaggctggactgcaatggcgcagtcttggctcactgcaatctct

SEQ ID NO: 13587 - DNA, 751 bp, Homo sapiens
cacccgatctgcattactttttcaatgaaaaaatatgacgtaaaggggcagtgtggagtgaggcacaggagggctcaagaaccatgagatccacaatcatgacaagcttggcattccaatcctggcccactctggagccacagtgggaccctgggcaactggctcccggctctctgagcctcagtttagctctttggcggatggggctaagggaccccaccatgtgaagatatgaggtcagaggtgagatcgtatgcgcggcctaggggcgtctggcatgagcaggccctgcggaaatgatcattctcctgaccgctgctggggcatggctgaggactgtccccttcaggtctgtctaatctctgatttctggcccctgagggctgctctgtccttgttctcccgggtagatggcagctcagggagggccggtagcactgccagctcctggccctgggggtggtctggacgaggggaggtactgctgggggctcaggtgcctggagctgagggaggaaggggtctcggctgaggtgggggcagttacccgaagagttgcaggtgtccgttctccttggcagggccggccagaagcaataggtccgggagctccagggctggactggaggctgccacccccatggtgacctcgttggcaacttctcccaaccgagtcacctggggccagaggtcagaggtcggggcaggatagatgtcggggcagaactgaggagggatcagaggttaggaa

SEQ ID NO: 13588 - DNA, 746 bp, Homo sapiens
cagcatataaaaccccaatccaaaggtcaaaccaggcacttgaatctctccagtcacctgcttggcacttttccaagtgttctttactttcattcctgctctaaatcttgtctcggtctctcactctgccttatacccctcagttgaattatttcttctgaggaggcaagaactgaggctgctgcagactgatatggattcaccactgctaacacctcctggttggaactacaggaatagaactggaaagggaaaaaaggcagcattcaccacatcccaatcctgaatccaagagtctaagatagtcccccactcctatctcaggcttagaggattagattaatctcctggagggaagactcttccttgaaacatttttttttatctgcctgtagctattgggataattcgggaaatccacagggacagttcaagtcatctttgtcctctactttctgttgcactctcagccttgttctctttttagaaactgcatggtaactattatatagctaaagaagagcattctgacctctgccctctgccctgggacttcctggatcctcctcttcttataaatacaagggcagagctggtatcccggggagccaggaagcagtgagcccaggagtcctcggccagccctgcctgcccaccaggaggatgaaggtctccgtggctgccctctcctgcctcatgcttgttgctgtccttggatcccaggcccagttcataaatggtgagtc

SEQ ID NO: 13589 - DNA, 727 bp, Homo sapiens
tcccgagtagctgagattacaggcatgtgccaccacgcctggctgacttttgtttctttagtagagatgggatttcaccatgttagccaggctggtctcgaactccagacctcaagtgatccgcccacctcagcctcccaaagtgctgggtttataggcttgatccaccatgcccagcctggctgtgtcttcacggggcagaaaaagagagtggtttcttgtatgtctcttcctatcccatcgtgagggccccacatgacctattcacctcccagaggtccctcctgctgatcccatcacactggggttaaggccttcaacataggaatttgggggacaccattcagtccacggccccctgcttcagctctttctcgggcacattccccgcgcctctgtagtgactgcccgcagaataggagctggtgttgggagggcttccgcggcctccacgcacccctgccctctgggctcactgtctttgcagaaaggggaccctgctgatcaacaacatctttgccatcatccccgccatcctgatgggagtcagcaaagtggccaaggcttttgagctgatcgtcttttcccgagtggtgctgggagtctgtgcaggtacctggggcccaggctccggctcagccttgggggaagggtctgtttggccaaggctggaagcaggagcagatgaggtgtctgcctggctctgcctcttttcatttcaagacgt

SEQ ID NO: 13590 - DNA, 725 bp, Homo sapiens
tgacctttgaccataagccctaactctggatagctggccccaccacacacataatcgtggccttgacgtcagtcccctgaccccggacccttatctcggcctgactgtactctgcccttaacctctagccctagtcgactccataaccgtggccttggccccagtccccctgacttccggacttcagaccagatactgcccatatccccttatgaagtcttggccaggcaacccctagggtgtacgttttctaatgattaaagaggcggtgctaagctgcagacggacttgcgactcagccactggtgtaagtcaggcgggaggtggcgcccaataagctcaagagaggaggcgggttctggaaaaaggccaatagcctgtgaaggcgagtctagcagcaaccaatagctatgagcgagaggcgggactctgagggaagtcaatcgctgccgcaggtaccgccaatggcttttggcgggggcgttccccaaccctgccctctctcatgaccccgctccgggattatggccgggactgggctgctggcgctgcggacgctgccagggcccagctgggtgcgaggctcgggcccttccgtgctgagccgcctgcaggacgcggccgtggtgcggcctggcttcctgagcacggcagaggaggagacgctgagccgagaactggagcccgagctgcgccgccgccgctacgaatacgatcactgggac

SEQ ID NO: 13591 - DNA, 720 bp, Homo sapiens
ttttcttcagcactgggaattgtgatccaaagcttttcctgatgaggcacaaagttggagaaacacaacgcaaactaaacaacaatgaaacagaacagagtgaatctgctgtagctcaagagaggacgtagctgcccccactccgcatccccgggctcgggtttgccttgctgacctctgctgccacctggtgctgcacagagaaactgaggagaaaccacatcagtctccttcagcctcagcttcacatctgtgggtcaagcaaccctttcagaagctgtataatgtgggaaagctttcctctcaggaaaatgcacacatccaactttgagaagatgcccttgggggtgcttcaaggatcctagataataaccccctttcccgaacatccaagaacctaagttttttttttttttttgagaaagtctcgctctctctcccattctggagtgcagtggcgtgatcttggctcactgcaagctccacctcccaggttcaagccattctcctgcctcagcctcccaagtagctggggctacaggcacctgccaccacacccggctaatttttttgtatttttagtagagacggggtttcaccgtgttagccagaatcgtcttgatctcctgaccttgtgatccacccgcctcggcctcccaaagtgctgggattacaggtgtgagccaccacgcctggtccaagaacccaacttttagatct

SEQ ID NO: 13592 - DNA, 716 bp, Homo sapiens
tagagttctgggcaagaaggttgggacccacaggtcaagcctagccccttagttttaccatgaagataactcaggccgtcggagaaagtggcctgcccaacgcaggtgctagagcgcgaaccaagagaagtcgatcctcctggtctccccggctgcctggtgagtggcagaccacaggctagacttcccaggccccggccctggaaggggcggggaaccctccccctcactgccagctggaagaatccgagcggtccccgcacgcacttctggaagtgcaagccggtagcgcggcgggccagggatacagccaagtcccgggacgtgccagctgcggtaactgaagccgggtcccgggcgggcgggggtaccagggacaggagtagccttggaaagaggagagggcctcctcccacgaccgtccggatcaccgcctctccgccggcacccccggggcccatgccgcgaacaggccggcgaggctggcaaggtgcccgggcccggggcggaaagcaggaagtcgatcccgcgggcgcggcccagggtgcggcgctgcagatgcagcacggggtcgcggggcgggcgcccagtgcaccggaggaggtgagcgccaggtcgccttcgcggcccggggacacaggcagggacgcgggagctgatgcggctggaccggccggggaaacagtattttctggaaggggtaagagatgctgtct

SEQ ID NO: 13593 - DNA, 706 bp, Homo sapiens
acgcgtgcacagcgtgtggatatccacacagtgcctgttatttggccagaaaaaggaaagcagcaccgatgcgtgctgcaccgtgggtgaactttggaaacatacctagacacagaaggtcacctgttgtgcaattccatgtaaatgacaggtccaaaaatggcaaatccctggagacaggaagcacatggtggctgccgggggctggaggaggggatggggagtgtgtgggtgctgatggctacgtgtggggtttccgtttggggtgatgaaaagttctggaaatggatggtggcggttgcatgacattatagatgtactttactcaacgctgttgaaacgtagttaaaatggcagattttgtgttgtatctgttttaacacacacataaaaaaggtgccaagcctggcatccgccttccctgccatctcgaggcgtgtcctctgagctctgctgctgcctcctgctcctgcctgctttgtccagctcatttgttgaccgactccaggcttccaggcttggctgtgtgggtcctgaccattcttggcaactctctcctcagctgaactttgacctggaccggggcgtgtttccagtagtcatccaggctgtggtggacgaaggagatggtgagtgcgtcctcttccgtcctcctgggcgtgcaggccgtgcagggaggaagcacgtcttgagggaggagtgcttg

SEQ ID NO: 13594 - DNA, 696 bp, Homo sapiens
tgaatgaataaacagaggaaatgaacaactgaagggcagaggtcatagtaacttgcccagggtcaagatggcaagactgagactatagccaggtttgctaatttccagtcgagatcaccagccttctgaataaatatcttgtcctaaattttgttctaaatcattggaaccaaagcaacgtcacaactcaagtccaatttctcggcctaccattttctacagatggcatttattcagcaagggaatgttgtaggtatagtaatttatcttttttccatgaaacatgtgttatcttcttgctctattttgaagagatattatgataaatgatgccactatttaaaacttgtaaagcttcttgaggttctcagaaaaaagtacaaggtataggtcaaaaagagtaattttgtctctcacaaaagaattttctgttcaaaaaatgctgttaacttgaaaaagtcatatctccaaaagaacgttctaataggtgggataatcatcatcatatttccagctataatccatcatatttccaggtgtatcccttcccttaaaagtaaaaaaggagaaaatcactttgctgtgtggaagtgctttgtgtgttttataaaatccacataaaatgttcgtggttcaaggagtggctgccgcatttctaaggcaaataagcttatccctgaagaagcttgaagatct

SEQ ID NO: 13595 - DNA, 3245 bp, Homo sapiens
gagacagggtctcattttgttgcccaggctggtcttgaactcctggcttcaagcaatcctcccacctcggccttccaaagtgctgggattacaggcgtaaaccaccatgcctggcctaatcatgcctttataaaaaaatcatttttttttagagaaaaggtctcactatgttggtcaggctggataggaactcctgagttcaagtgatcctccacctcagcttccccctgtgccccactcaatcatgcctttttattataactgattctgatggtatgctgacagatatacaaattaatccagtcctttggagcttaaaaataatacaatgaaaaaaatcatttttatggtgtggtgcatcataaagtttatttatttatttattgagacgaagttttgctcttgtcgcccagactggagtgcaatggcgccacctcgggtcactgcaacctaggccactccgggttcaagcgattctcctgcctcagcctcccgagtagctggcgcacgctaccacgcccaactaatttttgtagttttagtagaggcggggtttcaccacgttggccaggctggtttccaactcctgacctcaagtgatccacccgcctctgcctcctcaggcgtgagccatcgcgcccggccaataaagcattttaatgcatttttcctcaaagtattcataaacttcaacttgttctaggtaaaattattttcccctttctacccacaataaaatgagtaatttaagcccttaacctacacattattcttaccttggaatatttaataagagctgcgctaatattatatctgaataatgaaataagagaaaccaaataagaaaaatttgtcataaagccctattctcctacattagattatgtgcatggcacacacacggatcagcttaagctgggtgaaactatatggagttagaattcctggcttcctatcattcagtagctgtgtggccgagaagaagactttaatgttgtaggacctttaaaatgggctgtaactcaaaggccctccttctggagttgttgtgaatcacgtggggtaatatatactagtttacaagatggatgtgtaagcccgaaggtggagcaggtttgcaagccttctttcagcctagggacagtaggatgactcatgagtcaattcttctctccttcccgtcatttcgggtccaactcttcctcctgtagtccacaaaagagcacggctgaccgataccaagcagagaacccagtagggtatgtgaccacgttcagatcaacagaacgcaaagcagaacggtccgagtactgcctcctacagccactttcctttctttaagcctcagctgctgctctaggtgtaaaaccggcataaaatagcactacgtaccttgcagagttgctcggaggattgaaggagataatgtaagagagtttggctagtttggctatgatggatggacattttctcttttctaacgtctctcttcccctcctaatgaaacctcttctgaagctcgctaactatagcagggcttgcagcttcaaaaaaacctttcagtcaagatcttgaaattagtattatttaaatcagtgcagtaacaccaaggtgtaaaagactgttacccactggtggctttaagaggattagctgactgaagagttttagaaaacatggaaactttttttgtacgtggatggatggaattccctgatctccttatccccaccacttaaaccatgccttgtgggtgaccgtggaaggctgattgtggcggggacatttacaaagcacatttaattgataagcactcgattgttctgtaactatagaactagttcacctttcagttgcactgagtgcgcctaagataacgatcttatttggaagtgagccctcgctagaaagaaggggaaaagggtaagaccgaagctcaaatgaatgaccagaaaggatgttttcattcgaataaactcaacccagtttttgacctccccacccatctctgccaacttgaaatcctcctggaggggcgagctgctggggttcaggactgggcgttgcggctgcaggaagccgtgggacctggggggtccctcggccgggcaacccccacccacccctacaggaccctggtgcgggggcgagcagggagtggacgcagagaaagttccccgctctgctcccgccctctccgaaactcgagccagcgaggctgggggcgggcggacggctcgcagaggaatttgcagtttccgggaggttgaggaagcgacccgagcacagccccagcagacgcagccctagcgcccggctttccgggttccgcgacgctgtcgggagaaacccgcgcgcctggaaggggcgggccgggctccccccacctgcgggcgggcggggagggtcgcggccgcgcggggtggggctcggccggtcgcccgtccggggcggggcccagggaggcggggtcgcgggcgcaccggggccgagccgcgcctggagcctggcggggaggcggcaggaggggccgggagagcctgattgagcggcggccgcagctgcataaggactgcccggggctgcgcgccgggaacctcgcggggctggcgggcgccgcaccccctccctggccgcctgcgccccggggaggccgcccgcgcgcgacgggaccggcagcatgagcagcggctacagcagcctggaggaggacgccgaggacttcttcttcaccgccaggacctccttcttcaggagagcgccccagggcaagccccgctccggccaacaagtgagtggcgcgcggcgggcgctgcagcccgcgccccagagttccggggaacccgccagcccgcgccccctgcctccacgtgtctctgcggggcgctcgggggatgctcgccgggaaggaggagcgggccgagaagtggcttctgccttttcgggtcccgggaacgtgcctggagcttgtgcgtgtaggcgagggaaggcggaggaagggcggggaggctgagggccggcttctgccttccgcgccagatggcctctgcagctccgcctcgggctgccgcctgcggggagcagccccggagccagcaggcgtccccgggccactcccccaggtttccccttcgcgtccccgctgggtcgacggtcgggttcgcgcgcctgtccttcctgttagtcagcttactcatctgtggcccccagagtggcttgggtcaacgtgtaatagctaggggtgg

SEQ ID NO: 13596 - DNA, 3027 bp, Homo sapiens
ttgtcctactggtgtgtttgcatactgtttataactaaggagatgtttaatgtaatcatgttgactgaagaacaaaaagggtcataaatttcgaaaggagagctttatttctcataaagggttgcagcctgcaggttggtcatcctgacaagctgggaagcaaagcctcccaccagaatttggaaacagatacttccagggaggggcaaagggaacaggaatttatgctgggcagggtggccaaatatatatgttcagtaagctctaggaggcatcatgaatattcatggaaggagaaaatgtacacatgtgcaattgagcttcagacctttccatggcatggaacccgtgtccaaaaaatggcagcattagcatgatctcggggtggagttttcgatcttctgacatcaaaagatgaagcagagcacacaaaaacctttactgtgcttcctctgtagactggccagaaccactctatatggtttggctgtgtcccccctgacctaagtctcatcttgaattgtagttcccataatctccttaatgtggtaggagggacctggtgggaggtaattgaatcttggggtggttacctccatgctgttctcctgatagtgagttctcatgagatctgatggttttataaggggctctcctctgcccttagtctgtacttctccttgctgccaccatgtgaagaaggatgtgtttgcgtccctttctgccatgattgtaaatttcctgaggcctccccagccatgctgaactatgagtcaatgaaatctctttcctttataaattacccagtcttgggtatgtctttatcagcagcgtgagagtggactatacacactccatggttggtctcttatcaggaagaaatgctgctggttagttgttttgttgaaactgcaaaaggaaggggcagcagttaggctattggttgcagtcagcggtggatctttttttttttttagagacagggcctctgtcatccaggatgaagtgttgtggcccagtcataactcactgctgcctcttaactcttaggcccaaggaatcctccttcctcagcctctcgagtagctgggactacaggcaggtgccagcatgcttggctaaccttttttattttttgtagagacagggtcttgctgttgcccaggctggtctcgaactcctggtctcaagtgatccttctgcgttggcttctcaaagtgcttggaattatagatgtgagccactgtgcccagttgaagttcacgttattaattaactaattaattaattgacagtctctgttgcccaggctgaagtgcaatgacatgatcatggttcactgcaacctcagcctcctggctcaggcaatcgtcttgccttggcttctcaaagtgctggaattacagatgtgagccacaatgcctagcctcaggttgtttaaaaagtggctgatgggaatgaggaataaagaaaaatgtcattctcagtggtgaagagtgacttgggcacaatatgaaactgattccctggcatgttgtatttgggaaataccaggtggactgtttgaagttaaaacgttggttaaaggtaatgaaaaataaagttggattcagcattatcagattaatgaggaatccactctttggagtatttgtgtgtgcacagtgcattattgctgaatgcgtctgttataggtagttcctagtttataaagcaatattgtattgtatcgttgggtttatgttgtggcgatcagattatgatgtgatgagtgacaagtcatttaacctctctgagattgtcacttcttctgttaaattagatgctttaatcaggtcttattatctaccaccctcctagggttgtttggggaactactgattgtaccttatagagtgttgggatctgttaaaacagacattgtctgtaaagtatctgctactgtgtttggcacatgttaggcacttgatacatttagatttaaattttaaaaggctgttccacccataggagcagtccgaacttaggattctctgtattctgtagtgtaaattgagtgatacattgaatagttttacttcccaaattcaaggaatgatacaccaagaaaaatagcaatttctgtccctttcctgatctagcccttggtaaaaagctaatctttagtaacttttaaaaaaaggggtttagggggaattcatgtggaggtcagagtggaagaaggtgtgagagggcccagcagaagaaaacttggctgccaaagtgtttgagtccattggcaagtttggcctggtcttagccgttgcaggaggtgtggtaaactctgccttatataatgtggatgctgggcacagagctgcgatctttgaccaattccatggagtacaggacattgtagtaggggaagggactcactttctcatcccatgggtacagaaaccaattatctttgctgttctcgaccacgtaatgctccagtcatcactggtagcaaagatttatagattgtcaatatcacacggcggatcctcttccggcctatcgctagccaacttcctcatatcttcaccagcatcggagaggactatgatgagcgtgtgctgccgtccatcactaccaaatcaagtcagtggtggcacgctttgatgctggagaactaatcacccagagagagctggtctccaggcaggtgagcgacgaccttacggagcgagcagccacctttgggttcatcctggactacgtgtccttgacacatctgactttcaggaaggagttcacagaagccgtggaagccaaaaaggtggctcagcaggaagcagagagggccagatctgtggtggaaaaggctgagcagaggaaaaaggcggccatcatctctgctgagggtgactctaaggcagccgagctgatcaccaactcactggccaccgcaggggacagcctgatcgagctgtgtaagctggaagtcgtggaggacattgcataccagctctcgctctcggaatatcacctacctgccagcag

SEQ ID NO: 13597 - DNA, 2785 bp, Homo sapiens
ccaagagcaagctcaggaactgcctggcagatcaccctgtcccttggtgacctttcaactgggaaacagcgtcctctgtctgtgcaatgcttcttgctggggttgggttgagtgtgagagaaggggaggggagggagggagaacagagagaatgtgtgtgtgagagagagagagagagaatgaacgtgtagcgattttaccaggggtcccggctccgggaggagacgtgcaatccggagccccgacattggcatgactagaagttgttcactttctggggatgggacataagctggttttgaatgtatgaagctgaccctcacagaactccctggggtggtgtagaaaagagatgctcagattttctaaggggaggcaaaaataactcattgtttacagctccaaagcatgaactccttgaggggaaggtgggtgaagaacaattcacttcttcatttcttactgggtcttagagctgggtgtgatgggcaccgaggccaacccctctggattgtgtcatcttttcaccccttcacccccagactgtctaataatacacacatcataccttgtctccgtctctggaggcaagtctctgtaatgcccttccctatctccaaggagaagaccagcagtaagttctgtttttctgtgggagagaaagaatcctagaggcaggtgacccacctggagctggaaagcccactccacgatgcagacagctctctaccttcctgtggtggcccctgggcctggcattcccaggggacctgctggcaggaggaggaacgagggctttataactttggttataacttttggtctttgttctgattctcagtgtatcttcctccgctggttactaaagtgttcactgataagtatgttaactaatgatcgagacagtaacgaaaaatgctggcactgggattctctcccttcccagacctacctgctggtatttcctgggaccttgaccctgccccaccccctcagccgtgcccatctctgcagactcccagatcacatctgggctgatgggctggcccaggcctgtccctcccttcttgcccccagttctgggctccacctctgccctcttctgtgctgtcccattagggaagtcccttggcctgtctatttttcagttcccaattagaagtctagaacctgacaactccaggagttcttgggaggaccagtacaacgttctaaaaagcctgagacgccttacaaaaagcaagtatcatttggagtacaattcctaatctgttcatgtcctgctgaaggagggaaggagggagaggaaggcaggggagttgatgcattcatataacaaacactgctgggtgtctgggtgcccagagcaaagctgggccaggccttcaccagatcaagccccacagaccagctggtgcccatgcgctgctggtggtttggggcctcctgttcctcctctagctgggagtaatcacagttgtctgacctgattccaacttaaggtccccactctcttgccccatcaagaatccctgattatttacttttccctagaaaatctggggaaattcccacattttaattttgcagcagaatcttttgagcagcttttggaaccacagtgtttgccaagataagagtttgagaatccagcagccctgggtgcctggctgaatttggtttcctgcatgtgctgggtgtgggcggggccacgcacaggccctgcatgggaggactcctcaccccaggcctgtggtgctgcagacaaccgtctcctgtctacactgcgacccagccacaagctgtggggtctcagtggcctgggggaaagcagctccactctcctgcccttcctggctgcccctttgggttccagccggggtcacgtccagcctccactgggaaaccagtgactgaggcctggacccagaggtggaccaggcatctcctggccacctgtgacctgggaagaagcgagtcagtggcccgttcaacctgctctgcagctgctataaatagcctccctgtttccaagaggaggtaaggaagtgtttatcttctaaaaaccagacgtttcctgatgctctgagcgttactcagtgctacagaggagatgcacacgtccccactatgttctgtcttgagaaggggacaagagaaagaggaaaaggagccactgtactttattttgcacctacagcgtgccttggcactgggctagagaggcaccttcctgcgtgaatcctgtgcggcaggtcttattgccataataagtcacatcaaagacactgctggtcataaaacactgttttacataccatagggaaaaacgctgccaatcttaactaagatgctacaactgtacagttccttccaatcagagatgttcacgtgtgaaaaaaaaactgtgctacttacaatctatgaaagctggtgttatcccacttggcaggtaaggaaactgaggtcctgtgagtgaagtgacctcatgatcacacaacaggagatggcagggctgggattcaaacccgggagtgtctgctgccacatcccacactcccactgcctggctccaagtcccaggaagctcgagactgtgagttttctcccttgaaactcacctggagagagtccgggcacctgtgcctatgtggagggttccagccccagccaggcccctccgctgcccacaccctgggaggagaagcggcctcccttccaggctcatctgctcactgcccgcattctcctggcagagctgaggtctgagagatctggactccaa

SEQ ID NO: 13598 - DNA, 2776 bp, Homo sapiens
gctttccattctgagttcatgctgtgatttctctgggaactagcatgttattaagggacctcaggttttttggagcgacagcagcagcgtgacggctaacatttattaacccccaatgaagagccagtgcttctctaaacactgcaatatgttctcgagtaattctgtgaggattattgattggtgctgcagttatccccactccgcagatgtggaaagagagctgcctagagacttggaaactttccctaattttgttatgggaaagcagcttttgaacacaggcagtctgactccaaagctcatcactataaagcatgcattttactaattggcactatcacttgtttaacatgtatgtatgtatgtgtgtatgtatgtatgtgtgtatgtatgtatgtatctattttagagacaggatctagctctgtaactcacaacactggagtgcagtggtgtgattatagtttactgcaacctcgaactcctgggctcaagtgatcctcccatctcagactcctgagtaactaggatgacaggcatgtgccactctgcccagctaattttttatttttatttttagagacaggatcttattctgtcaccgaggctggagtacagtggtacgatcatagcttactgcagcctccaccttctgggctcaagcaatcctcccacctcagcctcctgagtagctgggaccacaggcacatgccactatgcatggctaatataaatttttttttttttttttttttttttttagtagagacaggaccttgctatgttgcccaggcttgtctcaaactcctgggctcaattgatcctcccaccttggcctcccaaagtgttgggattacaggtgtgagctaccttgcccagacctaattttttttttttagagatagggtcttgctatgttgcccagactggtcatgaattcctggttttaagcaatcctcctgcgtcatcctcctgagtagttgggattacaggcatgagccagcgggcccagcttaaacccacatttactaagagatgactgtgaggtcactactttgcgtatatattacctcattgttcataaagttaaaaaggccgtgtcttctgcttatggggaaatggaaggaagctcactctttgttaacagtcattttacaatatgaaagacttgctcattgtagataatttggaaagtatagaagagtatagaggaaataaaaacaacccagaatatattacctggagagaacttacatgtatacctttacatgtatgcctttacatgtataccttttgaacaaaatcactcttttaaagtgatttcataaatttatagctaacttaatgtaatctcataactcaaatttttgtcataccacagtgtgaaatcctaactgtatttttgaactaagtgacccctgtgcttttctcttgtgaaataaataccttttgaaaagctctctgaaagtttaactcaggttttggttttgtagttaaaagcagcacacaccatttctcctaccttcactgaaggctctcggcagcacctgatggcttgtgagtgtgtttgtctttggtgtatataggttttgccttagtttagaattctctcctgaagtcccccgcaatgtcactgtagccactaacccttggtcacacggagtgtggagccagctgtcagtttctgggcaggctctggccgggaacgcatacaacgtcaaagcagtgaataagcgatttctgcagttcccgtagctgccagcctgtgcagtcctctgtgatgcttggggaccggctcctcggtcacaccccagtcctgctctgaaggttgccgttttccaaacagaaggatggtagctagaggggagatagcaagattctggagtctggaaagccttcacttgggtatgtgtgcaaagaatggattgttgtactgtgacatgttgccgattcagctctttccttcccaagttgcagttcttcccctctctctctctctctccactctctctcactctctctctctctctctcactctctctctctctctcactctctctctttctctgctgcttgtcaggtgtgagcctgtggggaaaagctcactcttctagtaaagggtgctgaggatagttttagttgtggacatagtcagttgaagaaattggttttgtttatggcacagttgcttgtttggagtagaaaatcataagaatcaagcctgaaccatccttcctgaggaaggggtctgggttttgctgctgatattgttactagttttgctgctgatattgttactggtttttgcttctattacatgaaattcctttattcaatagattattggtggtgtgtataagaatgtttcttgctaattgaggatgtgtgaggtttaaggctgtgagctgatctttgaaaaatagtttcctgtttctaaagtgacattacccagtatttgcttactgctttgtgccttatctcccgctttctttttagtatttctgtgagtattgtctatttgtctattctgtgagtattggactatttggactatttaaatgtgaaagaaactttgtactctcacactaggaagccataaactctaatcctcacattctgaaaaggaagtaagaaaaaacaagacttcacagacaggcttttccctggctgcactacatggatacaataggatgctttagaaacagatcttgtctctgtttttgccctaaatagatgccagcgcctcgcctgaaatgaatgggaaccgtagatg

SEQ ID NO: 13599 - DNA, 2703 bp, Homo sapiens
ttttagtagagacggggtttcaccgtgttagccaggatggtctcgatctcctgacctcgtgatccacccatctcgacctcccaaagtgctgggattacaggcgtgagacaccgcgcccggccggcatgagataacaattctgaatgaagacgctgttgaacatcttggttgtgatactggctacatagctgcatgtttgtcacacctgttctctttatttatttttatttatttatcttagagacagggtctccctctgtcacccaggctgaagtacaatggtgcaatcacggctcactgcagccttgacctcctaggttcaagcgatcctcccacttcagcctcccgagtagctgagacaacaggtgcacgctaccacgcccggctaatttttctatttttgtagagatgtgctatgtttcccaggctggtctcgaattcctgggttcaagcaatcctcccacctcagcctcccaaagtgctgagattacaggtgtgagtcaccttgcccggccaaacctgtcctctttattaaaaatgcattttattgtatatatattacacctcgaataaactttaaaaataaagaattcgggtcaccaaagatttctttttcataatataattcattgttgtcaaaaaatgccagggaatggatcaccttacaactgctagaatagctatcatcaaaaagacgaaaggtaacaaacgttggcaaggatttgaagagaacacttatacactactgatggtaattttaattagtatagccattatagaaaatggtatggaagttccaaagaaaaatttaaaaataaaactaccaggtgatccaggaatcccacttctgggtctttatccaaaggaattgaagtcagcacgtcaggccgggcatagtggctcacgcctgtaattctagcactttgggaggctgaggcgggcggatctcccaaggtcaggagttcgagaccatcctggccaacatggcgaaacccgtctctaccaaaaatacaaaaattagccgggcgtggtggtggatgtctgtagtcccagctactcgggaggctgaggcacgagaatcacttgaacccgggaggcagaggttgcagtgagccgagattgcggcattgccctccagcctaggcaacaagagcgagacgctgtctcaaaaacaaaaaccaaaaccaaaaaaccccacaaagttattgaaagaaataaataaaaataaatacgtaaataaaagaaggaaattctgacacatactagaatatacataaatgtatgtaaatgaataaatgaatatatgaatgtgagaataagaagtgagcgcgtcattttttaccgttctcccagctcaaaacgttttcgccccgtccagcttttcggcctcctccgggcgccccctgccggtgggccgcttgcccgtgctccaagcccaaaacagacgcgtcccctctagtcgcttttagccttcggtctcggtcctgattggctcagagtcgctcgtgatcccttttgggaaatgtagtccttaagggtatcgcgcctgctttttctatacgctctgacgcagagatagccacgggaagtacgtcaccaaatttcgccggttcccacaagctaggtcgtgtgacgctgcatgacgggaattgtagtcctcaaattgctagcttccgatgccatgcgctgcgactggaacgccaattcccaccatgccgcgcgctcacagctctcaggggctgtcctgtggcctttggggaagtgtagtcttgagcccccaagattccttttctgttctatggagtgggcccgcgcaaaggactccatttcccggcgtgctgccatccgtcgggtcgcggcagccattttgttccgcccgaggagaccctaagatggcggcgagggggacggtgaaggttgcctcccgcccgtccgggctctgatcctccgtctccccgtcccccggcggccggcccatggcctggcggaggcccgaaccatggacctccgcaccgccgtgtacaacgccgcccgtgatggcaagctgcagctgctccagaagctgctcagcggccggagccgggaggaactggacgagctgacgggcgaggtggccggcgggggaacgccgctactcatcgccgcccgctacggccacctggacgtggtggagtacctggtggaccggtgcggcgcgagcgtggaggccggtggctcggtgcacttcgatggcgagaccatcgagggcgcgccgccgctgtgggccgcctccgcagccggccacctggacgtggtgcggagcctgctgcgccgcggggcctcggtgaaccgcaccacgcgcaccaactccacgcctctccgcgccgcctgcttcgacggccacctggaggtggtgcgctacctggtcggcgagcaccaggccgacctggaggtggccaaccggcacggccacacgtgcctcatgatctcgtgctacaagggccaccgtgagatcgcccgctacctgctggagcagggcgcccaggtgaaccggcgcagcgccaagggcaacacggccctgcatgactgcgccgagtccggcagcctggagatcctgcagctgctgctggggtgcaaggcccgcatggaacgtgacggctacggcatgaccccgctgctcgcggccagcgtgacgggccacaccaacatcgtggagtacctcat

SEQ ID NO: 13600 - DNA, 2695 bp, Homo sapiens
gctcattggctgtaagaactgctccgctgcgacagtgctgctggaggtggtggtgaacaggtacacccactgcagcctggagaggtggatgttgacgcaaagtctatgagtctcttgtgcagccagctcaaggctggctcttcaggatgtttgtgtcctgcttcccaaagagccttcaggcttcagaggtcatcttctccattcccctggctctaccacacaagccaccctggatgaggagaggttcatgccagagaggggtcgggattctccaagccctggctgcaggagaatttttggagcatgggggctgtcatctgaccaaagatgaaaataccacctaacagacgaggcaaggcccaccgtggggctgggtggctggtggagcaacagaaaggaacatgtgggtgagaaatgaggggaggatgcagtccagttcccgggtccagggacccaggttcccccgaacttcccaccagtcccagcttctttagaggatgtggcccagccaaggctgtgggggtctgggggcagtgggcccaagaataactcttacttatgtaggtctcttctcaaaggagcttggccatggtgacggtgatgagaatgttcaccagagccacatttttacaatctttatataatgtggtgactcgtttcctaagacctgaaaatacttcctccttatcctcacacctcgtcccagataaaatggcaatgccaaagtggcaaagcagaaagcagtgacttacctgaggccccagagcaagctgggcaagctccatgaaaaccagcttttcagcctgagcccagatattatctttgatcctggaccccattgccctggctgaccaagcctcggcatatttgatggaagtgttgcaattctggctcccctcattttcagaaattagtttctaggacttcttactttttaatccatcccctgataaagacccagttaagtctgaaccatccatcatgatgttcatttggcttaagatataaaagttttcagagcccacattcaaaactctaaaaatatcttcctcttttgatctaggtggcatctgtcctggtcatcggcctcgggtccagatggcctgaattatctgtctctctcatgcagtctttgctaaaagagaaggtctggtgtaaataatttaaaccccattcccttcccctctctgcagatttctgatgccaagctgatcatcgtctcagcaccagcaaagacatgctattcccgtccctgacgagcatttccttcttgagaaagtgattttgaggggctgcagatgtacttggaggaaggtttgggccgggacagatgacgtgcccatgtgggagctggacggcccctctctgggtagctccctgggaactcccatgtccgcctcccgctgcctcctgatccaaggtggatgcacttcatttgaggcctggtctttcgtccttccctctcctcttcggggaccactttgtctagtgctagactcattgtgcttcccccttggggcttccttcagccctcagccgattcaagacttcaaaaggaagttggacatggagaggaaaaaagaaatgaaaccaggaaggaaccgccaagaagcacacaacgcgtttatgctgccttaaccacacgcttgactctaaatgggtttaaaaattcttacttgtgttagcccaagaaagtttctgcagccgtctttttggtttaaacaatcaaatactcaataattctggggctggtgggccaggatatgggttactcagatcttctgcttcaccccatgctcggtccctgagccagttctgtcattggttctttcagaccagggcaggaaaagtcaagaaagcaaaagcggattctaggctgtggggtttgctgtttgctagccccctggcagagatgcctgtccttgcagtcctgaactggtggccaagtgtgcatgcatgcacgtgcaggtgtgtgcatgtgcaggtgtgcatgcgtgtatgtgcgcacacacattcatgcttgtacatgtttgtgtacacgcacacttttttctgctttcaatttcaagctgttgcctccctgatgtgtctgtttagtgacttgagccagaaagattcccggttctatgtgggatgagaatgaacgcaggcaggtctccacagaagtgagtaaagtagagctgagaagaaggacattgtctcatgccagcctgtccaatagccactttgccccagccctgcctcaagccccagagagatgacaaggctctctctgtttgtcgactccttgaagctcagaaaggtgggtcaagaggtgcccgtcaagcgtttaggcaagcacaggaccctgatctttactaagtctccacatctctcttgcacagccctgggctcagggcttggtcccctctgggcaggccatccagactaagtgacagtcagattgtgtgtggggaggctagagacatccattcttcatggatcagcctgaatggctggacagatcttgcaaatggattgtgtaagacagagtgtggaagaggaggctgtgatcagtggcttggagagcagagtgtggtcaggcgctaaacctaaggcttttctgggaagagctgttaagattagactgttctcccaaaaagccaataattctgagtgtctccattaatgcctaggtagcccatactctcaccca

SEQ ID NO: 13601 - DNA, 2645 bp, Homo sapiens
ggcgacagagcaagactgtatctcaaaaaaaaaataataaaataaggccaggtgctgtgaatcatgcctgtaatcccagcactttgggaggccaaggcgggcggatcacgaggtcaggagttcgaggtcagcctggccaacatggtgaaaccccgtctctactaaaaatacaaaaaaaaattagctgggcatggtggcccatgcctgtaatcccagctagtcaggaggctgagacaggagagtcacttgagcctgggaggctggggttgcagtgagctgagattgcgccattgcactccagcctgggcgataagagccagactccatctcaaaaataaaataaaataaaatgtgtcaccatttggaagatctgcataactcagtaaaccagtattttccaatgactggtgcttgatgttacaaaattcaaaatgcaaggtagtccagtggaaagttcattgacgtggttttatatttatatttatttatatttatttatttattttgagatggagtctcgctctgtggccaaggctggagtgcagtggcgtgatctcggctcactgcagcctccgcttcccaggttcaagcgattctcctgcctcagcctcccgagtagctgggattacaggcacctgccatcatgcccggctaatttttttttttttttttttgtattgttagtagagacggggttttgccatgttggccagactggtctcgaactcctgacctcagttgatccgcccacctcggcctcccaaaatgctgggattacaggcgtgaaccactgtgcccggcctgatacggttttagattccacattgcaactaacctttgagaaactgtcatttgtcatattttggtgtagtagcaaagaaaatctataattacctggaaaggctgttaaagatattccttctttttgtaactacatgtctgtgtgaggcagaattttcttcatatacttcaaccaaaacaacatgtcacaacagattgaatgcagggatagacaggagaatccagctgccttctattaggccagatgttaaagagatttgcaaaaaatgtaaaatgatgccactctttttgctaacttttttttagaaaattatttataaaagtgttgtttatattaacgtaatgggcttattgttttaagctagtaagtatcttaaacatttctcagttttaacatctgatatgatacatattaatagctgtcaccccctaaaacaaaactcttttgggatcttcaccaattttgagagtgtaaaggggtctgggagctttcaagttgctgaacacatggaggttcctggaggatggtgtgcccagggagggcgtggaagctcctcgcccctttcctcatcaaaaaaaaaaaaaaaaaggctgggtgcggtggctcatgcctgtaatcctagcactttgggaggccgaggtgggcggatcacgaggtcaggagttcgagaccagcctggccaacatggtgaaaccccgtctctactaaaaatacaaaaattagctgggcatggtggcaggtgcctgtaatcccagctactcgggaagctgggccaggagaatcatctgaacccgggaggcggaggttgcagtgagctgagatcacgccattgcactccagcctgggtgacagggcaagactccatctcaaagaaaaaaaaaaagagtttaaagaggtcttgggatcaggcagttggacagctgccactccagaccctagggtaccatgtcaggactgggagttgggggggtggcattccagtcaggatacatataacacagactggtgtcttctgggcgttccttagcttggcagagccagaagacccagaagctggagtcccagctcaaccaaatcggagttgtgggcagtcacgggcttccacaagcctcgagttgccccatctattcagtgggacagtagtgctgtctgcacaggggaaataccagcctcccgtttgtaatgctggtgaaaagtactttgtaagttgtgaaacactccacagatacttatttttgtgattgttttgtctggagccggtgtgattagcttccccagacctcagaaaacctgtccagtgggcgtgagaaggcattaggtggctaaatagggggcattagtggggggccccctccctaaaagggcctggctcccacttctccctccttagacctcgttcccaagctgaggcatgggctgggctgtactgggtgccaggtggaagggaggccactgggttgtcacccagcctggctctgggaaccttgggaaaaggagctgggaggcacgctcgtgcgctgtgtgcccgtccgcccacccgtcgcctgctgcagggcctggagccgctgctgggagaggaagtgcgttcagttaccaatcgggttattttcataacggctgtctcaggctgcagggaggagggtgacaagggggagggggcagaggagcagccacggctgctagctctccaaactaggacttgctcagcagaggccgccagcccggagctggatccagagcccggccttggggaccccagctcccacctgcgccctgccttccagatcaggtcaaaaggggcccccagcccctccttgctttctgcttcctccctctgtatctg

SEQ ID NO: 13602 - DNA, 2546 bp, Homo sapiens
gctcctaggtaaccccaaaacaagtgcttcccctactcggctgcaacccaggccccagacacaggatcaaggtgccctgccccacccccaggccacccagtgccctgtccacaggcgacagacagcacacaggaaggaatctgtcggggcagcactttgttgtacaaactgccaggggctcagagcccgacacaaaggccaaaaggcctttaatcccctggcagtctgagaggggcgccgggccggaagggaggtggccacagcctcctctggcatgcttgtgctgcccgtgccactcgggaggcctgccagcttctcacacaggggcccccaaggtggcaggaacttcaccagccagtcagccaggagaaatacggacgcccccaaacaaggagagggtccaacacgcatccagggcttctttgtgccaggggctgagctaaggtcttcacaagacttacgtcactcagatccaccacaacctcacgagggagacactggaggcacactcatttgatagataaggaaaccaggctcagagaggtacagttacctgctccaggtcacacagcaaaggcaatgggaacggagtctgaaaccaggactcccctctgctgggttcatgcttctgtatttggctagctcagaggcacagctgccagcagggccctgcttctgacctctgaccccttgccctctgtaagctcatatcaaggcctgcaacctggaaaagctgcattccatccagggcttctcgggagcgctggggcaggtcagggccttcagcggaggcccagagggcaggaagctggggtctggagtttctagtcccagcttagccccgcactcaccacgttgccttggacaagcccctgcctcctttaccttttagctaactttagtgagtctctactgtatgcactgggcatccacacccaccatctcagtccatgtgaacaacacgtggaaggcagtgactttgatctgttttgagcattgctgcaactccacaacagaaaacacacagtaggtactaataaatctgcggactcacggacaaaccaaatgaatgaacctgcccaacagccctgaggtggaaattaacccacctgacagaagaaagctaacttcagaaggagacttgcccaagattacacagcttgaaagtgccagaattacctctagtcctcagttcccattaatacgacagaggccataacacttcatcctaagggaaagaggggactaggtcacacgggccctgaaatccgttccaagacacccctgtccctgcagaacaatccctccaagaattagttctctccgctatgaaatgggagcaaaaggccgggcatggtggctcacgcctgtagtccccgcactttgggaggcagaggcaggcggatcacctgaggtcaggagttcgagactagcctggccaacatggtgaaaccccatctctactaaaaatacaaaaattatctgggcgtggtggcgtgcgcctgtaatcccagctaccctggaggctgaggcaggagaatcgtttaacccaggaggcagaggttgcagtgagccaagattgcgccactgcactccagcctggtcaacaagagcaaaactccatctcaaaaaataaataaataaaataaaataaaaataaataaaatggaagcaaaaaaaggtccccgctttgcctccttcctggggctactgggagaggcatgtggaatgaggcggtgatctctttgagaggcacagtcccaatctctgaatctgcctggcccttctccaggcaggccccatgtggtctctgccttggaggctcctatgacatagctaggggtgggcacccaacccggtctggcactgaccaggcaggggactggcgagaacacttgaccaccagccggtggggcagagcaggctgtgctgtcagacacctccaagtccgggccaccctggccatattctagctagggggcttcagcttcctcatccttaaaaaaagtagaatcgatcagatctgtcccatttggttcaattcaagtcacttcaacctcgacttacggggtacctactatgtgctgggcccgggggacaaaatgtgaaatggacacagaactccatgttcctgggggacacaggccacggaaccacgtgctggcaacaccgtgcgaagagagtgctgaaggggaaggaagggggccggcagagcccaggggagggtcccctcacttagggaggtggctgggaggctggggaagatttccagaagaaatgctaactcagctgggcctgagagatgacttcacctaagcaaagcagagaaggggaagagtgcggaccaggtggagggaagggcacacgctgaggccagggctggagagggcacggcacgttcgcggggtgggaggaagcctggtgcagcgggacacgcgtgtgagtggcagaggagtcaaagggcggcacgagtgggcttttccatttaaaagggccgcccctcagttgtgctgctgacccggtgctagtcacagaggccaagtctc

SEQ ID NO: 13603 - DNA, 2371 bp, Homo sapiens
atgcagccaaatttgaaaacactgctctaaaagcagagggagatatagaacagagagcacagggatatttccggggtataataaacaggacttggtggttagttatgaattggaagggacaaaaagaatggggcctgggaacaatcctaggtttctggcttgtgtctgggtgaatgaaagaagcatgctttgaggaaagaacaaactacatcttggacagcctgaatctgaggtgcctctaggaattcaagttggggatgttcaataggtatttgttttttaatagatttatttggcctagtgaagaatagaaagtccttctaatttttaggaagacaagaaagccagaagcagcatctctggaaaatattaccgttgtacagagtgtaagaccattttcattccgcacagcttctttattcaaaatcccctttcaagccagtgccccatctgtgctgaaatgttgtttaacatgttgatctattttcttttcttttttttttttttttttttttgagacggagtctcgctctgtcgcccaggctggagtgcagtggcgagatctctgctcactacaagctccgccgcccgggttcacgccatcctcctgcctcagcctcccgagtagctgggactacaggcgcccgccaccacgcccagctaattttttgtatttttagtagagacggggtttcactatgttagccaggatggtctcgatctcctgacctcgtgatccgcccgcctcggcctcccaaagtgctaggattacaggcgtgagccaccaattccggccaacatattgatatattttcaagaaggatattatatatgggtacttaacttactattcttgtgctatctgtaggcttaaagcatcccatatgtaaagtcgctggcagccttcaagtagcatttaaaggtataacagctttaaaacttcccataaatgaaaataaacatacccataattacttcctttaagattcgaggccaaagacacttaaacctaaactgcctagcttgttcaattttctaattggtaaacatttactgggttaccaaagataccaagtacattcggaaagaccatggctccttggtttgtttctaatttaaattacacagacacactaaacaaggactgggagagtgatatatttagttaagtaacagatggcaaatggacattctgtccagcctctatcacattcgtttctcagtattctatgttagagtgatctaaatcttgaagagaataaaccaggaggaaatgcaccaggcccagacggaatttgtttattcaactaagaataccaagactagtgtagattgaaacattcaaaggggatatgactggctgaaaagatatgagacgaaggaacaaataaagctggattaaagtaattaggaatgtattagagatgaaataggaattctgattacttgactgcaaaatagtaaaaaaaaaatgaaataaaagagatgaatggaagatactctccaaaccctcacgtaggcttgctattgtggctaagtactgttcctaacagcctctgcaaagacaggtgcactaagagggcggctgcagacgcacagggtgctgccgtcctctgggaaaggacatttcctcgccgagagctgcaacatcccggcacttctctccctcggcctgccaatctagcaggtgaaccctgagaacacaaaggaatgaataatgccgggcaaactgccaagagccagagtcgccgagtctggcaactcccttcaaccgggcgcagctccagccaccccgacctgtccttggaggagacgctctctgggccacggagaaccggccagggagacaccggccccactgcccggcgcgctcgaggcgaagtcccctccgccagggacaggcgtgggggccgcagtcggggccacccgggtgcagcggggcggctcctgcgcgggcgcggaacgaacgtgcgcaagggaacagccgcgtccagagccgcccgcagcgggcccggtgggcgtgacgccatgacgcacagcacgcgggcggcgcgctggggcggggcggccgggggcgggaggaagaagtgggaggaggaggaggggaaagcgggggctgcgggagggggaggtggtagttgcggcgctggttcccgggagcagccgtcgagccacaactgcggaggaggagttcgggaaagcggccgtcgggactcctcccctccgtcgtctccgccccggttgagaggcgcctcggcgcatcggagggaccctcccccgcgcttcctcaggctgctgtcgccgctgctgggagatgggcctactcgcccgccaccctgcgctgccgccgctctgaggagttaaaggtacg

SEQ ID NO: 13604 - DNA, 2299 bp, Homo sapiens
cactcacctcctcccccacgcccatctgggggtctcgagaggccctggacacagcgatggacagacgcactgttgctccttttagacggcggtccccacagccaggcctgtgctgctgccatgaagaatgtgaggaaggggcctcactggccgctgaggaggggtctcgctcacgttagccaacaaacagggtccggccgacatcctttactcagagggggtgggtgttttggggtcaatggcagatcccagatgagggcagtcagctgttcagggcctgccgctggctgagggcgatacagagggggcatagggatcacctgcttcctgactcaggggagacctgggcaccagtcttggagaggacccagcctccttctctcctttttttcatgtggccagaattctgaaacgagttaattgtcaccaacttcccaatttcctccctgtccggtggtcctctgccaccttcgcaaaggtcctgagggacagaaaggaaggggaggggacccagggctgggagacttccttcagagtcagtccttttgacagtgtatccctggcccagagggctgtccattttgggtttttgggtttttaggtaaaagtgttacttgctgttatcacttggggaaaagtgattttgtaacagcctggggagcttggctctcaaagcgcctaggcgatgctagcctccgtgccccaggtttgagctgtccatctggacaagctcttcccatggccaccacagagcagcctcccagtgttggtggtggtcattacgtgttcacggtggggggaccaggtagacagatagccagaacgcgtggccctgccgctgtggcagaagcatcccaggccttctgaaatgatgtgctagaatagcctgtcatcatctaagatacagcacagaaaaaataaggcagctcctctcaccccttggcaggggaatgggctgccagtgatcccttctgacttcgcccttaatcttggccaccgacagggaccctgactatccagagccccagatgcaggcccgaatcagatgaactctgagcatgtcctcagggggaagtgactggagcttcactccccctaaaacccaggcaggcgagaggtttgggtattggaggatgctccgggctgcgtgggagtgggggcatgatggggtgggcttccttcgtttgcttagtggagcaccgctgcgtgcccagttagaggaacacctgtggccgcactgtcatgcctctttcttttcttttcttcttttcttcctttctttctctctctctttttttcagatggagtctcgctcttgttgcccaggctggagtgcagtggcgcaatcccggctcactgcaacctccacctccagggttcaagcgattctcctgcctcagcttctcgagtagctggaattacaggcacctgtcaccacgcccggttaattttttgtatttttagtagagacgggggtttcaccatgttggtcaggctggtctcgaactcctgacctcaggtgatccgcccgcctcggcctcccaaagtgctgggattacaggcgtgagccaccgcgcccggcccaaatggtgatatatttaaaatgcttccacttggcaaattattttcaactctgcccccaagggaaaaaaaaaaaggaaagaaaacgctgtacagccgggcttctccaaactcgatgacagtagaagggactgattcccagagagagccggccgcgcgcccagggacgccagctggacgcgtccgtgtccgggtggcccaagacaaagccctgcgtggagggcccctcacaggccccaatcgggccgccccctccgcccgcgtcctcggaccccacgtgtaggtcccgggaagcgcgaccaggaggagcgcgggtcaggggaccgcgtgccggagagggtgtctatccgggggccgggggatcccggggcgcgagagaggcgagggccggcggtcggcgtgggaggggcgcgcagatgatgcaaccgctctggcgccgccgcgcgctctgattggccagcgcctggcggccgcgcccggattcgctggcgcgacgggggcggggcctgggtgcgggtgccgcgtggcggccgcagcgctgaggggtgggtacgacccgcgcacggtagctgggttggggtcgggctccgggaatggtgggcggcggtcgccgggtggggcgcgacggtagcccagttctgggcggggtgggaacccagacgggggacccctaggcgccgggccctccctctccccgtacttttcccccttcccagtc

SEQ ID NO: 13605 - DNA, 2216 bp, Homo sapiens
catcagtgtgacctggatgtgagacatggagtcaaaggagatcattttggagctttaagaaatgactgccttgatggatctggacttgcatgcggcttttagctccttcattttggccagtttctcccatttgaaacaggtgtatttatccaatgcctgtacccccattgtatctaagaagcaactaacttgcttttgattttaccagctaataggtggaagggacttgccttgtctcaggtgagactttggactatggacttttgagttaatgctgaaatgagttaagactttgggggactactgggaaggcatgattggttttgaaatgtgaggacatgagatttgggagtggccaagggcagaatgatatggtttggctgtgtccccacccaaatctcatcttgaattatagctcctgtaattcccacatgttgtgggagggacccggtgggagataactgaatcatgggggcagtctagcccatactgttcttgtggtggtaaataagtctcacaaggtctgatggttttataagaggaaaatccttttacttggttctttctctcacatgtgccgccatgtaagacaagccttttgccttctgccatgattgtgaggcctccccagtcctgtgaaactgtgagtcagttaaacctttttccttcataaattacccagtcttgggtatgtctttattagcagcatgagaacagactaatacaccttctaattagtctccctgcttctgtagttcagaatgatctttctaaactagattatgctgcccttctattgaaaatattacactggcttctcatcttactcagaagacacggtaagatcttgacaagtggctcccaaggcaccagacttctaggacttcatgttctattactttctactatgtacattctgttttagcctcaaagacctcaccactctggctaggacccaccaggaatattcctaccacagggcctttgtacctgctattttcacccagaatgtgctttctccagtatctaaggctgttaactacctccttgcctgtgctcaggtgtcacttcataagagtcctttcctgattaccatatacatatcatcctccttatccctgtttttttttttttttgggggatggagtctcactctgttgtccatgctggagtgcagtggcatgatctccgctcactgcaacctccacctacctggttcaagccattttcctgcctcagcctcccaaggagctgggattagaggcacacaccaccacacccgctaattttgtatttttagtagagatggggtttcaccaagttggccaggctggtcctgaactcctgtcctcaggtgatccgccctcctcagcttcccaaactgctgggattacaggcgtgagccactgtgcccagccccttgttgtttgttgttgttgttgtttgtttgtttttgttgttatttatagcacttatcaccacctcatgtattatatagttattcatgatgtgtctcttcccatcagaatatatacaagagaacaggaaccttgtttggttggtttctatacctccactgtcttactaatgcctggcatttagtaggtgctcaataaaatctttgttttagaaaatgattaataaataatatgtacatattgaatattgtttcctcttttaacaaatctttaataataataaaaaatttaaagcagcaagattgctttgcatcaggcacaatgataagcgctttaaatggagcccatgattcactttcatttatagagcccacatgctctctgtcaggcgcagaaggtgccagccctgcaggagcttcgggggcggagcagaaggccgcctaaaacagcctttgctaagagagcatgcgtaggcgacgcgctggtagagctgtggacctgccagcctgcgaggcggaggacgggctccatctcttagaaacgcctacggcgcatgctctatggggtcaactggggggctggcaagcggcagcgctggtctggggcggagtctccgaggcacttcccggtggctggctgctctgattggctgaacaaatagtccgagggtggtgggcatccgccctcccgacaaggcagaccaggccccctgcaggtcccctatccgcaccccggcccctgagagctggcactgcgactcgagacagcggcccggcaggacagctccaggtgagagtg

SEQ ID NO: 13606 - DNA, 2201 bp, Homo sapiens
tttcctccttgtttcttcgtctgcaaaagggtgatgttccaggtcaggagatcgagaccatcctggctagcacagggaaaccctgtgtctactgaaaaatacaaaaaaaattagccgggcgctgtggtgggtgcctgtagtcccagctactcgggaggctgaggcaggagaatggcgtgaacctgggaggcggagtttgcagtgaacagagatcgcggcactgcactccaacctgggagacagagtaagactccgtctcaaaaaaaaaaaaaaaaaaagggtggtgttgccagaagccaggagaggatgaggaggttgtagaagcagagtgcttacaagcaggaaagcagagtttcagctgggtacagtggctcacacctgtcatcccaacactgtgagaggccaaggtcggcggatcacttgaggtcaggagtttgagaccagcctggccaaagtggtgaaaccccatctctactaaaaatacaaaagttagctggatgtggtggtgggtgcttgtaatcccagctatttgggaggctgaggtaggagaatcgcttgaacctgggaggtggaggttgcagtgagctgagatggcaccacggcactccagcctgggccacaagagtgaaactctgtctcaaaaaaaaaaaaaaaaatagagcttatattctttttttttttttttttgagacagggtcatctcggagctgatgactctgagttagcaccatctcggttcactgcaacctccacctcctgggttcaagcaatcctcccacctcagcctcccgagtagctgggacaggcacacgtcaccacacctggctaatttttgtgtttttagtagagacagggttttgccatgttggctgggttggtcttaaactcctgacctcaggtgatccgcccagctcagtcttccaaagtgctggaattgttcaggcatgagccaccgtgcccggccaggtgtttattttctaaatccaaaattttttatcagatctgctcagttttaagtaacatcctcaaaatctattttgctcttctgttttctaacttggtaagaggtgttttataattattttccaaattacactcaaacaccttccatctgtccaaaggtgctggagagtcatgcctgtgagccctgggcacctcctgatgtcctgcgaggtcacggtgttcccaaacctcagggttgccctgccccactccagaggctctcaggccccaccccggagccctctgtgcggagccgcctcctcctggccagttccccagtagtcctgaagggagacctgctgtgtggagcctcttctgggacccaggtgagttccctggtactgccctgcagcctgtgtgggaaggggggtggtctatctttctgaccttctctcccagccctgggactggagaggacaagattaagcatggggatctttcctttcttggccagacttccagtaagggaggttgtctgttcctctaaccagaagacttctttgaactgtgacggttttatattcctcacttggtagaggcagaacgttcatctcagccaaccccacgcccatctggagtgtacttccccgggatgatggccccaaatggaggcaccggcctcttctttttgcctaaaccacttctagaaaccttttataaaccacaggccttaatgtgtatctttaagtcactgctgttttattcatcatcagcaactgactttgagacaggtcttctaccttattaattttaaaagaattgggataatttattaagttgccccttaatagcacttcatactattttagctttaatttcttcactttttaacaatatgattcattaaaagtcatattttaaattaatttttaactgtttgcagttgtatttcatgtaaatatttattgactaccctttaaagcataaattttgaatattattagatatcaacagccacatcttaaaaaaaaaaaaaagcaagagttttaatttaaaaagagccttgatataaatgattttcaatggactgaaaccaaaccaaaagtaaaatgggtcatttaaaaaaaaaaaaaaacccttccccgtgcgctggagtctcccgggtcattgtcggggagcgctagctcatggtgatctaggaatgactcgctaattgtttgcctttctatcccgtgcatcttaacctggctgatggatga

SEQ ID NO: 13607 - DNA, 2154 bp, Homo sapiens
aaatcccactcctttttcgagactgggaccctctggaggctgacccagccacgcatttgctagcatgccctgcagacatgaccctcgctgggctctgatcagccttcaggcctccactccaggtgtcactgttctgtctcccctctgctctcacagccttctctgctagatgtctcagccgtgctggccctctctatttcagaagtgaatgtactgagagggtcttagggacttattaataatgctcctggggtcggatgtagtagctcatgcctgtgatcccaatactttgagatcacttgagcccaagcgtttgagaccagcctgggcaacaaggtgaggccccatctctatcaaaaattcaaaaaagtagccaagcatggtggtgcacgcctgtgatcccagctcctcgggagactggggtgggaggatggcttaagctcaggtcaagactgaagtgagacatgaggccaccactgcactccagcctgggcaacagagcaggactctgtctcaaaaaaaacaaaacccactataaccataatactattatcacacttaagaaattcataattccttaatatcatcacatatccaattgatatctgagttcaattatttcatgtcaatgtttttaaactatttcaatcagaatctaaatgaggtcaacacgttgcaattggttggtatgtcttttaaactccttttaatctacaggtttctctttttttgccttgagtttcatttattagagaacccagacattgtcccatatagtctcccagagttggatcttgctagtttcatccccacggcctagtttaacacattcctctgtcctttctattttcttttttttttcttgagagggagtctccgtctgtcccccaggctggagtgcagtggctccgtctcagctcactgcaacctctgcctcccagttcgagcgattcccctgcctcagcctcctgagtagctgggattacaggcgcctgccactacgcccagctaatttttttatatttttagtagagacgggggtttcaccatcctgatcaggctggtctcgaactcccgacctcaggtgatggacccgcctctgcctcacagagtgcaaggattacagacgtgagccaccgcacccggccaaatgtcctttctattttctataaattaacagtcagatctaggggctcgatcagatttgtgtgtgtgtgtgtgccgtgtgcgcgtgcacagcatgttctttgactaggaggcacacctgctttggttatcttctttttgtaatctttaagttgctctttgatgtagacgtggtaactaatgttgaaacaaaattagtttcgtttcaaaacctttctttcaggaagaggttgtggttgattacttctgcgacaggtagatgcaaggttgagcaatcatctcttaacagaagtggtcacactagaataattcaagcacaacaacaaatcccacatcatcaccccctcttaataatggtgttttctttttacttgattagcttttaattgtcacgcactctgcattttttccctgaggtattatttccagaaggcagcgaaatatgactcaatggctaatttgctttttaaaaattaaacaaaacttaggccagctgccatttaagaagggctccggggcctccagactcggtgtgaccgtagccgtgcccggtgctcccctcgcggaggcgttagggcggcaggtttatctcacttgagaccattccttcctttttcatcttctccgggctccggcgcagcaggccgcaggggcgggcactcgcaagaacgcggcatcctggatggtggccgagtcaccgaagctcagaaccccgcgtcccagaatcgctgagagccggccccgcacgggggcctgggagcgccacgcgccctccacccagagaggcaggcgggcgggccggggggggcggggcctcgggactccgcccacgcctccgtctcctccgcgctccgccacagccggccgacaccacaccagccggggagccgccgccgccgccgccacctctgagcagccggctgggagcgagagccgacagctagtctgcaagccaccgctgtcgccatggggagccgcgtctcgcgggaagacttcgagtgggtctac

SEQ ID NO: 13608 - DNA, 2107 bp, Homo sapiens
cccagaacagtatgctccagaaataagactggaaaaagggaaagaggggcctcaagtccaggagaccagcggctttctgaacgcgcacctgccaacccactttggacaggtcacgatggacagcgtggcaggaaaagaaaaggtcactgtctacccaacacatgagaaactgtttctcgtgcctcacgtccccactccgtccccacccatgttgtctgagtccctcggtgtcagaaacactgctaagaaatttaagaaattctgttaatgagtttaagaaatgtttttaatgattaaaagtcagtgacttgtgaataaccatgtaacttacaaacgcaaggaactctgaaagtgtgcagcaccaccgatcagaagagaaaaccaagggacccgaaatatgctttaattaaattttcttttaaaatgtcactggaaagaacatcttgggaagacggcctggccgatcgccgtgtgaagggcaagccactctggccgagagggagccccacacctcggtctccccagaccggccctggccgggggcatccccctaaacttcggatccctcctcggaaatgggaccctctctgggccgcctcccagcggtggtggcgaggagcaaacgacaccaggtagcctgccgcggggcagagagtggacgcgggaaagccggtggctcccgccgtgggccctactgtgcgcgggcggcggccgagcccgggccgctccctcccagtcgcgcgccgccgcccccgcccccgcccccgcccccgcccccacccccacccccacccccacccccagccggcgcccgcgcccgcccccgcgccgggcccggctcggcccgacccggctccgccgcgggcaggcggggcccagcgcactcggagcccgagcccgagccgcagccgccgcctggggcgcttgggtcggcctcgaggacaccggagaggggcgccacgccgccgtggccgcaggtcagagtacgggtgcccgcggcgctcgggaaccggctgctggctgggcggggagtgctcagggagggggcgcggagggctggggccgagggtctgggggctagggccgaggaaacgggaactgacggggtcccagacggatgagagctggggagaagggggtctcggctgaggggtccggggctgaggcagggtcatggtccggcaggacccggactgacgggtcgcgggcgggcggctcacgggtgaccgggtgaaggggtcttgggctgagggcacccgggctgagggtcgcgtctaccggagcgcgcactaggggcggagggcgcgggcacagagagccgcggccggtgccgactcgagtggacgcgagccggtgcgtcccggcttccaggacagcccccctcgggagagcgccgggtgggcgcggagccggggacacggggacctccgcgtccccggcggaggtgcgcaagcgtcgggagccgctccgggggaactttggagcagggtgtctggacccggggaagcgaagatccgcgtgcgtccgtcctgaggccgcgcggcacccctgctgaggaggaggtcccgttcgctgtccagagcccaggggcgaccgccgcttggggaccgggggaccgttcagcgaggggcgcgcttgtagctggccaggccctgtgccctgacgcgttgtgctggccctacgcccggcggaggggctggggacggggactgggtgcctccgtgcctccgcggatggagcgcgcagccaggacccccagccgcaccccggggggctggaaaggcgaagtcgctgctttgtgggctcctgcaagtgccaggcgctgaccactcctcctgggagcctaactgaggggggtagaggcagcagaggttaacagaaatctcaggtcccttggtggaaggtgggtgtgtagtcgtggtactttacgcctcggtgtttagggaggagcctaaggtaaggagtcagaaacggggagtaaccgagctgcggcttttatataaggtcagtggtaggtaaggaaggggccttaacctctgctggtgaccagaagcctgcatttctgcattctgcttaattccctttccttaggtgagttggctcactc

SEQ ID NO: 13609 - DNA, 1800 bp, Homo sapiens
tggaatagaggcaatgtagaaaaatgttagaaagtgttgttcaatccttcacaggcttttcactgcatggtacaaagttaagcatttaaaaattggctataacccacttggaagagggcatttgtatgcttaaagtggcctcagaaaaggacagcagagaatttaggaagattagcaactggactgtcaggcgaactcaggctgttggcctcaactccaagagggagcgcagctaggcaaaagaatacggattaagcggaagaggttggaacacctgtccaggccaggtaggggaggagtttcaatgctgacaaagaacccgttgggagagcttcctaaaacacccagctgtcatgacgcactgaggagtactctactagttgactgttttgaagtgtgtgtgtgtgcgcttgcttgctttaggagacaagctattaatactaaagcatatgttagggagttgctcagcgtacttgatatctagtagcaccagccaaactagctaacagcctttccatggagataggccaggaagtagctccatagagaaaaaaggaagtagtggacctgcctccaaggttccgatactgggaggtgaaagagatctgaagttccgaataagctgtttacactaccagagaaaaatctggctcccatccaaccctcacccacgaggtgcccattccagacatggggcaagctgccttctcatcttccgcaggtgacagctcggctcacatttgtccacgtcttccatctcgtgcgctggcaacatacctaaatgattactggaagagctgcctctttttataatttcctgacagaatttataaaattaaaatatttaattaaagacagaatcggggacatgttgccttcacatttgctgttcaacctgtgcacattttggtggttcccaagaatcgtcatgccaaagcatcaggcttgaaaggagagatcaccttaagcatcaagatttaaaaaaataaaacacaactctcctcagtctaaactctaggatttggatgacgcttccctgtcaaggtttctcccgagtggaggagacaagaggcaggaaaggcaggtaactaaaattgcctcatgtaaaggggctcagcgcagaggaggaatgagataatagcggcggtgggggtcttttcccttctctccctttctatcttggaaacaggggtccgactggcagcggagtgggggcagtccaagctccggggtacctgcaggaggagactcgaccagcgagaggggccagcgagggtgaccaggtgcccgcttggggaccccgccggcggtggccaggctagcccaggtcctccccgatcccaggatgcactgcgccccgccccctccccgcgccgcgttccgcctcccctcggccccggccccctcccgcccagcgcggggaggcggggacgcgtcggcggcggaggcttctccagtcgcgtctttctcactcactggggagcccggcggtggcggcacctttcgaggtagacccgctgagctgctagcccgccggccagcgagtgagaggtcggacagactgtggagccgacagactgaaggacagcggcaccgccagacggccagaaagttccgccatgagctggggcacggagctgtgggtgagtcggggagaggggcgccccgcacggaccccggcccctgagaagcgcgggttgggcgggcgccgcggaccctcggcggtgaaagcgcgctccgccgtcctcggtccggcgctggcggagggtgagggtcccgctcgtctttgtgtgcagactc

SEQ ID NO: 13610 - DNA, 1796 bp, Homo sapiens
cacgcctggctaattttgtatttttagtagagatgaggttttaccatgttggtcaggctggtcttgaactcctgacctcaggtgattctgcccgccgcagcctcccaaagtgttgggattacaggcgtgagccactgcgcctggcctcttttactttcatttgactgaaaataattatctctgtacacagaatttaacatgtgactttttcttgatcctacatgatatgcaaatatcaataattatttagtaaatcatacaagtctagcaaaacattttttatactacattactggtaaaaattaaaatcaacaaaatccagcttagctccttcaatctattgtccaataaacaaatcgagtcattagaattatttaagtcaaaaccacaaaaaccttttactttctcttgagaatcaaggaagacttttctctcacaagaatcagattttgtttcatagcaaggtttagatttgataggctttttgtcctttaagtgctggtagaggtcaataatgttaatatgttaacatgttcttattcctaaggatgaaggaaatcagctaaactcatctcatcttgctatgaccatttcgccggatttctcagcctcagcactatggaatttcaggtaggggaactcattgttgtgattgtagggaactgtgtgttcactgcaggatgctcagcagtatatctggcctctgccaactagatacgagtagtactcatcccgtaagttgtggcaatcagcactgtctcgagacattgcccgtttccaaaattgagccattgacaacacattgaggaagctctgctcaacagacacagagacagctgcatgctcataattttggctgacacttgtgttcacaatgtgttaggcactgtgccaaagattttatgcacattattttatacacatccctaatttataaagaggaaaattgacgttcatagacagaaagtggttgagctgggtttccctgctttttctatactcaggtgaccaataacttccatgtgtccttggcattctcagctttggaagctggtcatgtgtttgtggtcacgtgtttgtaaatagatctctcttaccccatgcatgcaagtatgtatgcagggatagaactgggtataactctacccaaatgagtaaagatggacaatgaaggaaaggactttgaaattctcccatctctagtaagtagctgaaaatcacttatcactataggtttccaacactatacaagatgcctgtgaagacaatagacacagaagactcaaattgcctgaaagggtttagagcactgtaagaacctcccagtatctgatggcctcttgggttgttcctgctgtaatcaggaaactaactccagacctctgtccctgaaggtagacagagcttcggctccttctctcagagggcaaagcagagttcaagatcacactcagatcagccagagtgccctggtcttggcttgaagcccagggtataatcctagttcctggtagggctttgactgtgttgaccttcccagatcttggctgcttcttatttaactggagccaaggactcactcagaagttccagggctaaccgatcccttggcctgcctcacactgaccttgagctgcagcatttacccagcctttcctgagtgaactccagcagtgagctgctattaatcacaccctgttgtaacatcccctgcctccctcttccatttccttttctctggagacactagcgcctgtgctgtttcaggtaatggacacccagatgcctcttttaga

SEQ ID NO: 13611 - DNA, 1773 bp, Homo sapiens
tcaaaactggcctagaagtagaaaaaataatgaattaaagattattttaagttccaattcagaaagcacataaaggtcaacttatgaccacaaactaaatgttaaaagaacttaaattatgtctttcttagaccttacattttaaaatgttagaagatccttaagaaagtgttactcatcagtcttttaaattcctatatggtccaataaaccaccacttagaaaacatgcaggcacattcagaagcacaataatatgggccattaattctcaacagtctatttctgatggaatggagtacaaaactcaattggtatttatgtatgggggaaaacatccgtaaatttagtcgactctttcctaaactactactcagcctcaaaatcttttcggaggcaagctgctagcgggggaaaagaaaactgaaatgagaaaaactcatctccttgtggctgtcgaagcagaaaagctagttgacagtaatggtttagaaatgttggcagctaggatctactaccgtaaacaggttgcctcggttactatgtcacatttgaaagaacttagttaaccatggcagactggactgcgggaaactaccaaattatgtgtaacttcctatttttgtaccttaaaaagactcccttttaagaaaaagcccttaacctcattatttccttctatctgcagcattcctgctctccgcatatccctcaccgtgacatcctcgaggcttatgaagatgccgtctcccattctgtaaccctgctttagccgctacacgggcccctctttcctccccaccattttcctaaacctgccttgccccataaaaaccatcccggtgaagggcctcccctacttcccagcaaggcgcactttctctcttctgcagcagaaagatctgggccttctgcacttactgcttttagcctcctcaggggcagaggctagggacggggacagggccggagcctgggccagggcaggggctggggctggagccgaggccggagtcggagccgagtccagagccgaatccggggccggagctgggaccccagccgagtcccgggccggggtcgggacctggacctgggccacctccacctcctccttctccaggggcagcagctcctcctccgccatattctccatagttaccgcctccgtgccaagcccgcccggggacccggagcggggctcacggcggggtcagagaactgacgtgaatgcccacagggctggatccaaggagtggggaagcaagtggggagggcgggatgcgtgcaacagacaaaagatgaagaaccagtgaccaaatcctgttagtagaaaacagaaagccagaggcagcgattccagatgcccgtccgcttccctttccccgaggcgttacgacgccaccacaaactgcgcagaagcgtactggggacggcgtccaattgggtaagagggttcggtttctacggtgcgtctccggcccaccggccaaccaccaaaccgaacaaagactacagcacccaggatacactgcgcagtctgggggcggggccggagttcaagcctcggaggaagtaaatgcaaatctaagcgagcgctgtggggcggtgagtaggtagtgcggatgcgggcgcagaactacgtttcccagcaggcatacagttggtggggcggggtgtgtgtgtgtgttgggaggcgggggtccctctcctttggcttggggctccggagttgccactgccgccggcgctggtaaggtaggaactgcggggt

SEQ ID NO: 13612 - DNA, 1606 bp, Homo sapiens
gaaggatatgtgggtgtctggagggtggggcaaagttcaccataggtgcctggctaatcaacaagggtgagtttaagagaagtttgtgaaagggccagttcccgcctgatctccagttcccctgcctaatgagatctgggtttgctttccggagtgggtcctcctgggcgcccgctgccacaaatagcacagtggcaggcacagctggcagcggagggcaggcagtggagcgggcatagcacacattgcgttcccgaggaggggagccctgatgtgccggcacccaggggctttgtgcattccgctccggcagctcgagcgtcacggcccgaacaaagcggctttgcagggcgctctcctactcctcgccattggccaccgggccgcgacctctccttgctctggcagagtcccagcgccttgcgtaggcacaaagtcagcccctcaccccccagcgcatgaagtaggggcgggcatggctcttgggccgctggagaggggtggggttgtggggtcggagctggcggcgcctccccgagcccgtccgcgttgcccttcaccctcctcgttcccccgcccaccacaccgccctggcacctcccgccacctgtttccttgtcctcccagctcgccttccccttctccttattttgcatcctggggttccagggacaaggtccctcccgggccgcctcccaccctacgcacttctgagcctcaagggcacccggtcccgggtcccgggtctagaccggctcatcgcacagagtagcagagccgggctcatcgaggaggcaggaggggctcgccagcgtggcacgggcgcccggcgggaacctccacccgccccgcggccgcgcgtccccgcctcgaattcagccccgccccggtgcgccgggctggaggggcgctgacgctcagcggtgtcccatcggtgaccttggacggtccctccacctctccggcctcagtttcccttggctgcagcggccgcggggcgctaggtgggagccgctgagcgctcccggggccccgcccaccgcgagcagccaatcgggcgccgccctccggggggtgtgtcccggggccgaggcccggggcccggagggcgcgcggggcgggcggggcttccgggtcgggcctcgggacactggctcgcgcggaccggggcagggggcgggccgaggggcggtgcgtgtcgcgggggcgcggctggcacggacgcgcggaggcggcgccgggcatgggccgtggacgcggcggccccgcggcgggggcagcgggcggcgggggcggaggcggccgctagcgccctgcccggcgccgcctccttcggcgttcgccccacggaccggcaggcggcggaccgcggcccaggtgcccgggggcgggcgggcgggcgggcgggaacgcgcgcgggggtccgcggtccgggcttcccaggtcccgggacccggagggcggcggacgggggaggggcaggggctgggcggcgcatgcgcggggcccggggtctcggggtctccgggtcccggggacccgggggcccggggtgcgcggctggggacctgagggcgaggagcgaggacacacaccgaggactctt

SEQ ID NO: 13613 - DNA, 1574 bp, Homo sapiens
ctgccctacaatctggagccccgagcaaaagtgcggaggcgggggtgcccacctctacccttgaggtctcgaggcgggtgatgtggggggcgtaagaagtaggaatctgccttttgagatctggagaggtccacggcaccgccctcgagggtctggtgatggtgctagtaggttggcggcggagtgaggacgaccctccttcgggggttgtaggaaacgggccttgctttttgggatctggtggagccacagttcttccacggaggaatctgaggggttcatacggtcctgccctcgaggatggcgaggaggggacaagtgggaaggcaccagctctgccctccactgtctctggggaacacgcaatcctgccagtaggggtatgggaagacccctgctgtgctccccgaggtgggagtgggaaacggacagctgccttctggagcctgaggcatgccgtggccctgccctcgaaatggttggggacgtcatgacactaggttggggagcacaaggcaccctgtcctttggtgtctgtggaaagcccagcactactctccagggtctcaggtgaagacatggccctgctattgggagtcaagggggcacgtggccttgccctttaggtttagggacacagtcctgacctggggagccctggttcattcatttactcattcgacaagtacttattgatcatctactaagtgtcaagggtgtcgcaggctccccggatacatggtacctctctgccttggtggagaccccagcctagcacgggaaatgggcactaataaaatcattccaattgggtgtaaaactggtaaaagtgtgaaatgttcattctccagttagagagcttgtcacaccccgcatgtctgtaaaatctgttctcccggccagcccggaagcccaaattccctgtcttctcgaaagaatgggaaagcccaaccacgtcggagcaggactcgggcgtctcggaagtatttaggtcccccagctcgggtactgggaccggagggatagcagagcctcctaggaagtgggtagaggaattagagcctcggcttccatctccagcccccaagcagtaagcggtcctggctgcccagccttccgtttggctgcgggcaggagacagggatttgggggtcaggtctcgggtttggctacaaaaggtggaaagacttccggtctgcatttctgggcggggattcgtaaagatacaccttctggttggctgcggtaggccaaggtaggcggggcattgagtggaaagctcggctgggcggtgcctgtgggccctcctatagagggcttggtaggcggtggcggggaggggcgggttcccaggccgactctccttgtggttggctgaggctggaggtggacgggacttttggagggtcgctcgcgtctgttcgcagagctgtgggcggagttgaggccttggaggctgagatgtggttctgcgcgtgtgcggacggctgtctgttaactccgcggtcagttcccggactggtggctggtctgcagggttgacctgcgcaatgcagaggctgcaggtagtgctg

SEQ ID NO: 13614 - DNA, 1497 bp, Homo sapiens
taagcagttttctggggtaaacgctgtaaggttttaaaatctccaaatgttccctgcatttgcactgtctacatttaggcatcaacttttactacctctaggattagtttttcctttcccaatccatgttgacaaagtgggtcataaagatccgtagatcgtttgcccagatctgccctcaatctgcgaatcagcttcctcgttttagaaaatctgaaatgtaaaagggaaaggggctgggatcgcgtggggaggaggaacgaaatggaatcccgcgtgggcaggcggctggccaggagcacattcccctagcctccctacgcgccagccccgcggcgttgggaagctcctccctgacctttccttcctcctcctcctcctcattctaggcggcagtggcgggcgaagcgtgagcgctgcggtattttgtcccgaacggtgacccctcctcccaggcaggctgcggcggcgtcggtggcagcggagcacggagaagaggcccgggcggcccggcggcctggaggccgcgaaaggtggaggccgggccgcccttgtgcaccgcaggattgacccgggaaggggcagaagctagcgagccccgcccggccgccgggaaggtgggggaagccccgtgcaccccccgccctccggccgccgccgccccgctggccctgcagccgtcgccgctgcctcgggctacagccccgggctcggcggtcccggctggggaaggagggcggcgagcgcgtccggagccgccggagatggcgggagggcactgcggcagcttccccgcggcggcggccggcagcggcgagatcgtccaactgaacgtaggggggaccaggtgagtcggcgggtagcgggcttgcagcggggatgccttggcggcctcctcctttggtgtcgacggggaccgagagtcgcaggaacgagggcgagcgtgggaggccaagcctggaggggaacgtgggggcctccaggcggcaagaacgtcgggcggattttggagctggtgaagcatctgctctgggaagggagaggcagaagggacgcttggaattaccgaggaccaggcccatgtggcagagtagctgctgtcctagaatgccaacctttgcccctcccaacaggcaaggagaaccattacacagccttccttacctcatctcagattagagtgtatttgaggactttatttagtagaaacctggctttgtggtttggatgttggagatgaacttgctttcctttctctttggtcaacgaggtgtcggttttcttagggaagagtgcggtgttcttttccgcgcctaattaggggatttgtaatttgaaagatttctgtgatgggagtgcagtaggtttgcagtacctagttatttattttcagaatttcttggtgcatgggcttgaaggatctgttcaacttctaggacagtgtgtccagaaactgcagtttgaacatttgcttttaggaagctctggatattggca

SEQ ID NO: 13615 - DNA, 1496 bp, Homo sapiens
aaatcaaaaagttagctgggcgtggtggcggcgcacttgtggtcccagcctctgaggtggaaggatcgcttgagcctgggaggttgaagctgcagtgagctgtgatggcaccactgcactccagcctgggtggcagaagcagaccctccccctggaggggaggggaggggaggggaggggaggggaggggaggggagggggaaagagagatcctactctccattttaatacaacttgcttttttaattaaaaactatagctagaaccgatagatttcactcgtccttaaaaatagtcctgtattattttatataaacatctctcgctatttatcaaggccgtcacttgttcagaagtattctcacttttgttttgttttgttttgttcttaacaatttgctccctatattcctgggctggcgcctaggcctgcatccgggatttggcgccacatctgcgggcagggcctctgaggtctaggggagggacggcgccggccaagtcccgcccccgtccgcgtcgaccaatcagctccctggaaggcccctcctcaccaccccccacccccgcagtctccgcctaagactttccaagtcctgtagtttcgagcccgctgccctttgcctcctgggcggagaagctgcttcctcctgggaacaaccgcctcccgctcctagcaggttgctactgccccgaacccgcgctgcagggaacagcggggcaaacagtgagtggggttcagcgtagactctggaccaggagaggcccgcggtgaccgaggcctgggccccgggttagtgtccggggcggggagcggtgggcggggtgcgacgtttagcgtctggggagggccgggcgtggattgcggcctctgcgcgcgcccccaggtgatagagccgttccaccgaggatcccttccttcgtctctaccccgttgatgatttttctctgcagctcggtgcctatttcattctcgccgcattgttatgccctctgctgggcaggaggcgatgaccccccctattttcgtaggatttgttttttgctccgcaaggagccattaagatctgagctagcaggaaccctcgaggcgatttgatctcgccagctgggggcttgcattcttctaggctagcttgtctccgttaagcccaggtggaagttctcatccaccccagtgctctaggcgcccacgggcgcagtgtgggtttgtggtgggggaagggacctggggaggggtggcggtgagagcggcgcggggattcaggctgaatgttagtctggaatgcatttggcctgaagcagcaagtgctgggtgatacagttccctggtaaacagccgagagctggccgctagtttggcccaacctgcaacggaagaaggccttaagtacaggagaaaaagatctttgccaattggataatcatggaaatttagaagaagtacagctcgaactagacgtaaaggacagaatgtgtctgtctagctgaccagc

SEQ ID NO: 13616 - DNA, 1496 bp, Homo sapiens
agtatgtccagagtgtccccaaaggccacagtgcccgcctggagccctccagagagcgtgcactccctggggtgccagccagagacaacttgccctgaggcttggaactcgattctccgcgtgccagagaaggggtgggacttcagaacccccaaccccgcaatctgggtcggggagcctggcgcactgcgggccgctccctctaaccctgggcttccctggcgtccagggccgtcggggccgagtcccgattcgctcccaccccgaagccgcgccaggaccaacgagggcgcagccgtatgccccagcccgctccgcggagcccctcacagccacccccgccccgaccgcgccccgcgcggctcgaagcaccttcccaaggggctggtccttgcgccatagtcgcgccggagcctctggagggacatcaaggatttctcgctcctaccagccacccccaaatttttgggaggtacccaagggtgcgcgcgtggctcctggcgcgccgaggccctccctcgaggccccgcgaggtgcacactgcgggcccagggctagcagccgcccggcacgtcgctaccctgaggggcggggcgggagctggcgctagaaatgcgccggggcctgcggggcagttgcgcaagttgtgatcgggccgctataagaggggcgggcaggcatggagccccgtaggaatcgcagcgccagcggttgcaaggtaaggccccggcgcgctccttcctccttctctgctggtctttcttggcaggccacagggccccacacaactctggatcccggggaaactgagtcaggagggatgcagggcggatggcttagttctggactatgatagctttgtaccgagttctagccagatagaaggttaccgggagctggggagcgttggatttgctgctgggctgtgccggtgcccagaaggcaggaccttgcagaaccagccaggtccctgggagactgtcagacccaccaacctggtggcattcgcagagctgagatgcattggaaattgccttgggcacatccccaaagatcaggatgtcccaccccagtctgaaggagataaagttgggggtaggagagacgcagatgcaagtgatcagtctcagtcccagacattgccttgctctgcgggtaggaattcaggattcattttccagggaagttcctgacctctgaatgagaggggctgtgtaaggccaatgcctgggaggaaggcaaggatgagtagaggtggggggaaacaagtgtcaggaagactcaaaatcttccagagaaattgtgcagggtcttaccagatctgtcctcaaagccatgcaaattgccttctttgcaatgcatacaatgaggtgtctctgggggtcagaactggttattagggaacttctagccaggactgctaaatacgcgctgttggcccaccaggctcacctatagccttccttcagtctgggcttggtttggatttcactgtg

SEQ ID NO: 13617 - DNA, 1493 bp, Homo sapiens
acattcctgcaactctgtgaccacagcaggggcgattacacattcctggcctggcagccaacagtgtaaaaaagaacagaatgtcctagggccccgcctagcccccagcttcacctgggcccctcccgggtctggacaaggttggagggggtggcgaggaatcagcaggaaagaggagggaccaggaggaggcagacgcatcccacctgagtgcgctgctcccacttagtgagcggggaggagacctgcagagacctcttctctcttctctgcagggcctgagggtgaggctgacctgtgggtgcccttggagggctgcccacttgctgagcctctagctcctggaagcacacttgggactccccccttgctctccttcctggagacagactccctttggtgctggctccttctatttgcccccaccactgccccccacctgcctctactcactcagtgcccctcctccatccctatctctctgtccttcgctgtccctctctattgtctccctctttctgccctcctgtcctcccggttccccacccaggccctctcagcctggctggccccttctccttgtgttgccctcctagctgtgggctcaggatccttctacttgttcagatctttgcccctcacctgccatcctgtcccccagcctccttgcctgtctgcgtctaaagcccctgcccagagtccgccttctcaggtccagtactcccagttcacctgccctcgggagccctccttccttcggaaaactcccggctctgactcctcctcagcccctccccccgccctgctcacctttaattgagatgctaatgagattcctgtcgcttccatccctggccggccagcgggcgggctccccagccaggccgctgcacctgtcaggtgagggggaggagaggtttggctgccagattcaactggaaaggaaccagtcccagtccagccgcaacctgggagtgggaagctggaggcagcccagacctcctggagccctgcagtcctggggcagagacagaatcaggacacagctcgaggtcagggccagaggctggagctgagggcctagagtgagagggggcaaggcaagggggggagaggaagagaggcaggattagagagaggaggcaggccagaaagaggagagcaggagagacccaaagagaaacagaaggcagatagagagggagtgagaggcaggagctgagacacagatcctggaggaagaagaccaaaggaagggggcagagacagaaagggaggtgctaggacaaaactcgaaaggtggccctatcagggaagcagaggagaggccgttctagggaagcccagctccggcacttttggccccaactcccgcaggtctgctggctccaggaaaggtggaggagggagggaggagtgggagaatgtgggcgcagggtgggacatgggcatggccaggggcagcctcactcgggttccaggggtgatgggag

SEQ ID NO: 13618 - DNA, 1486 bp, Homo sapiens
aggtcctctgagcagaagcaggcaggggacccagcgccgcggtggcgggccgcctgctgcccgtcccctccctcgggcggccgcgggagtcgaaagcgaaagctagcccgcgccgcggactttgagcccggggcggggggtggccttgaggaggcgggctcggggggctgggcggccatgggggcgctgtcagcgtgccccacccggtccgcgggccgcgcacgccgccggaactccctggcgcctccttaaaaaacggcccccgcgcgactctttcccccttttttttgttacattgtaggagcggaaagaatgtcggagcgggccgcggatgacgtcaggggggagccgcgccgcgcggcggcggcggcgggcggagcagcggccgcggccgcccggcagcagcagcagcagcagcagcagcagcagccgccgcctccgcagccccagcggcagcagcacccgccaccgccgccacggcgcacacggccggaggacggcgggcccggcgccgcctccacctcggccgccgcaatggcgacggtcggggagcgcaggcctctgcccagtcctgaagtgatgctgggacagtcgtggaatctgtgggttgaggcttccaaacttcctgggaaggacggtgagtgtccacgccctcctccccccttcaccccctcgcgaccccctcctctctcctcccctcccccctgcccccctcctgtgacccgccccctcgaggggcagagatgctatcgtttgctgggttgcggaacgcggaggtgcccacacctaccccgtgcgtgcgtgagtgtgcgtcacactcctggccactgacctgcctctcccctcctcctgtgtgtgtatatctcctagggacagaattggacgaaagtttcaaggagtttgggaaaaaccgcgaagtcatggggctctgtcgggaaggtgagtccagcccccctgatggagtttgtacaaacccctgggaagtttcattgacagttcactgggaccgggaacatcagcccaccataccgactccccgactccccgtgcctgcgaagatgctgcctgaggagggagggagggggcagagcgcttggaaagtttggtttgggggcctcctgtaatgagagcgtccggaatccttctgtgaccaggcaggagcagcattattggtgatgagcgctgggaaccggcgggaagtttaacctagatctctgcatttctgacctccttacggagaaacaggagtagaggaaggaattctcagctttgaaacctttccacgaatgcttaggggacattttctgttggcaatcgaaacgaattttgaacttaaagaagatgctttacctatgcagtcttatttctgtaggatttaaggtacaagttggggatgttagaaaaaggtcatcataacccggagtgcattttggtcagattttttgcgagctgccaatatcacgggggaaagaaagccagaatttta

SEQ ID NO: 13619 - DNA, 1411 bp, Homo sapiens
aatgtccttcatgcacccttagagccattcatttttcccaaatggggtgcatcccacattttaggatacgatttccatcgtttctaggttaatttggactcatcctttagttcgcagattaaaaaataaatccttcagagaagccttccaagactactgcccagctaaattactttccccttacaataggaggcactaaatacacctttattgaaagcctattcccccatactacttcatcgtattcattacattggggcacggtgcatttatgttgtcagatctcctattaactagagaataaattctgagcgtactgtgcctctctgtacacttctgtaacttccagatctttgcacaatgaatacaaatgatgtaaggaatgacaccttcacagttcctgcaaccccaggatggtttagccccaccttccccctcagccaatgacaggcgcccccctctgccgctccggtcgcggacggtgggcggggccacgccgtgacgcatccgtgcgtctgtggaaggctgcgtttccggcctgagaaaccgtcatgtttctggggagtcacctcagctggcagttaccaccgtgttagaaagcagcctcaggaccggccacctccatcactggcgtcaccatgggggctgtgctgggtgtcttctccctcgccagctgggtgagttcggggtcccgagtcctcgccggacctgcggtttgcggggaaaggcctcgagaccagagctgcacgggccttggctccagaggctctcgggatgtcagcaggccctgggctacagagggtctccggggccccagacgcaaatccgcgataccctcaggtccagcttaggcggctcgccctccgggttcctcggggaacggaagaggctaggccgccattgtttacaattcggatggctccgccctgcgaggcttcctgactaggttcctctggagctggagagggaccaaggaatgacagctcccagcgaggggctccggttcctcccgaagcacctcttaaggtgccatcatttagttctaggtggctcaagtaatatttttatcccctagcacgggatttgccaaaactacagagtgtgtggcaaagctggggttttagcggaggcttgtctgcagttcaggtgcaagggaaagaagcccttgtggattgttattcaaaattggaaaccagggcctgaatattttgggactgctgtaagtcatttatccgaggataatcaccccagcattcctctcttcgagaacgattgtgacagtgaagtgaaggtttaatcaccttgtaaactgtaaacattttaaagagaaaattatagggcctataaaagaatatgctgagttccctcatttacccacttcagaggagcgtgattccttgattcctcattc

SEQ ID NO: 13620 - DNA, 1319 bp, Homo sapiens
aactcaaagtgtagggagaggggtgcttccgggtcctaggccgatttaaatatgttctgattagcaattggttaagttgttatcaatagaatgtccaggttgtgataaggggttgtggagaccaaagttttattatgcagatgaagcctccaagtaacaggcttcagaaagaatagattgtaaatgtttctcatcagacttaaggtcggccttgatgttaatgacccaccctcacccccacctccttccatcatggcctgaacaagtttttcaggttaactttggaaagcccttggcagagaggaagggtctattcagatggtttggtgttgggttcagaattttattttttggtttacaccattatatccgatcatatataaatacaaacaaaaacttcaccaaatattactttctttttctaatggtgtgtgtgttttgggacaggatctctgtccctcagactggagtgcagtggtgatttctgctcactgcagcctcaaactcccagctcaagcgatcctcccacttcagccttccgagtagctggaaccacaggcacccacatgatgcccagctaatttttgtatttttggtagagatggggtcgcattagattgcccaggctggtctcgacctccctggctcacatgatcctcccgccgcggcctccgagcggctgggatcaggcgttaatcaccgcgcccgggctttatatttcgttttgaaaatgctgagatggacgcaaagggctgagtgctcagtgtcccccagtcaccctcagttgcagcttccgtccaaagaaggaatcgccctctccctgctggggccactaacagcactaacacggtccgaatggcatcggcaaagctcgggaacggcgacagatgggaagacgcgtgggagcctgggggatctcgggagagccgcgcaaactcgcggcggacgcagccagcacccgcagccagcacccgcacactcccacccataccccggcagcccgccaagactctctggcccgcacctctatggtaggaaacccagaaaacaggaagtggcctcgagagggggaagggaggggcggggcctccgccaccacctcagctgcggaccgaggcgagatggcggccaccgagggggtcggggaggctgcgcaagggggcgagcccgggcagccggcgcaacccccgccccagccgcacccaccgccgccccagcagcagcacaaggaagagatggcggccgaggctggggaagccgtggcgtcccccatggacgacgggtttgtgagcctggactcgccctcctatgtcctgtac

SEQ ID NO: 13621 - DNA, 1238 bp, Homo sapiens
tatttgctttagaatggcccagatttccttcaggggattaaagagagaaatgaacaacataagaaggaaaggaagaaagaacaaaggccaaatgactgggatttcctggagtgagaggaaagaagcaaagagagaagtttgaggaagtatctgccgttcatatgaaggttatttatagtgactggagcaaaaacaatgatttaaaatatacttcaatgtattaggaacacatggcctactctttgaaaaatgtgtcacagatgttgataaaattttgaataaatattcattgctattgtttgctgaaccgtgttgcattgaatacacctttgtacagcattgaatcatgtgggcgccaattgtataaatctttcttctgtatgcaggtgtgtatttagctgactattgtggattagcagtaggaccttttgcagttatttatacgaggtaaaaagaaataaggagaaagaaaagaaaatttgcagctactttgcaataaaaaagaaataaaagacatcaaacaagaaatacatgaatatgtgaatctcagtaagatatctggaaatacaggtttaataatttattggcctatacttttctaaatttcacccttaattctgccattaattcctcaacttcgttcccagatcaggatctgtactgttacaggaggtagttagtcagacatgagcagggcaggagagagccctcggccaccaccaggaatatctggtgatggccaaacagttgttaagctggctgtctaaaatattaattggtcacagctggagcgagggaaaggcggtctccaaatagacaaaaacacctgaaactggtaaacagctgcttccgaataagatctcagaggttgggtaagtgcgttcaagcaggcaccctaaaaggcaaaatgatggcgcttaactagtatttgaccttcctctgcaaacatccgactgataagggaaaaacgcctcaagtgagcatgcgcacaacttccgtaaacacactgtgcatgtggcccctcccaagtgctggcaggccactgcacgtgcggacagcccaacccaaggaaaaatcagtggggaagaaaaaggggagaaggaatgcaacaccccggaaacatgccaacatataaaaccgtaagtcaaaggtcaaaccatgcactagagtctctcaagttatccatttgcccctcttccgagtgtactttacttcctttcattcctgcttcaaagctt

SEQ ID NO: 13622 - DNA, 1216 bp, Homo sapiens
cagtatcatggttgaatggggttacagccagatcacatggttgcttacgggtccagagtgggatctttggttcatgatccttttactagggcttctagcaggcttgtatcctatttagtgcctcagagggccaaactggctctagaatcatactgtatagggctggggaggggatgagggtccacttcaaggtctgtaaatggtgggtctattattaggtgtgtagttggggaagagtttatctagtttgctgggaaggctgctcatgggtctctgagtgggttcctcaacctgtggcacagaggagttagtgctaagtcacaaggtttcctcggggtctatagctgaaaccagtgtcttcatgtctgtctctggggtcatggttgagtgtgttttctggcaggtctgtgggcaggcagatttgcctcagactgtagttgagttgggctggagctggatccagaattgtttcaagatctgaaataaaactaaggtctgtgcctgcaggggcactaatgatgtctctctccaggtccctgtatgggcaaactgctctctagcatagctgagaagtgtcgaagccccttttctgtccaattaaaggatctgctgtgaaacctaggtcaatggtctcctagttgggacatggatgcacatgtcctccctctgtatccctgagctggcaagactgctcacagtccacagctgagaagggtgaaggtcaagattcaaggctgtttcagaaactaccgtggaactgaagtcagcaagcctgtactgctgacaaagatgattgagtctcacagcaatttcctgtgattaactcaggtcacagttgagaggagtttgagtggagattcagggccattttagtatcttctgtaggacagaggtcagcaagcatgccccagaggtacagatgtatatgtctcccaggaagtctctgtgggtgaaggactgatctcaagttgtggctgacactagttaaagccaagttagagggctgtttcagggtctacattgagactacagttgatatgcctacctcctgagacactagtgtgtgagtctcctcctgggcccctgggcaaatggttttggcagcatgaccaaggcctaaatggggctgaaggcaagcacaggaggatgggtcccttttcaggtctggagatggaatcactgttggtaagtctgccacttggatgcaaatctattc

SEQ ID NO: 13623 - DNA, 1199 bp, Homo sapiens
ttttgcccgaaacctggaggcgccggcctcccagacgctcccgggcccgggcagaggggcggtaggggcggggcgggcgggctccgggtttgggcgcgcgggcaggtggggcgtggcgggggcgtggagagcccaggcccgcggccaccgccccgctccgggccggcccaggaggagccgcgccgggctcggttataagaggccggctagcaggcgctccgctagcacccgcccgaccccggcccggagcaccgggcgcccagcgcgggtgaaggcggagccgcagggttggcccccaaagggatgctctcgcccgagcggcgagaccagccccgctcgcccctcgccgcggccgcgccgcagccgcccacggccgccgacatggccctctactgcggcgacaacttcggagtgtattcgcagcccggcctgcccccgcccgccgccaccgccgccgccccgggcgcccccccggcagccagggcgccttacgggctggccgactacgccgcgccgccggccgccgccgccaacccctacctgtggctcaacgggcccggcgtgggaggcccgccctccgccgccgccgcagccgccgccgcgtacctgggcgctccgccgccgccgccgccccccggggccgcggccgggccctttctgcagccaccgcctgccgccggcacttcggctgctctcagcggcccttcgcgcagcccgcgcccgccgcgcccgcctcgcccgccgcgcccgcggggcccggggagctgggctggctgtccatggccagccgcgaggacctgatgaagatggtgcggccgccctactcgtattcggcgctcatcgccatggccattcagagcgcgcccgagcgcaaactcactctcagccacatctaccagttcgtcgccgatagcttccccttctaccagcgcagcaaggccggctggcagaactccatccgccacaacctgtcgctcaacgactgcttcaagaaggtgccccgcgacgaggacgacccaggtgagggccgctggcaggtgcttcccagccggggagggcggacgcgggtcgcaagggccggcgcaggggtcggtgtgcggctggaagatctgccaggagtcttcttgtccaggctgcgggtgggagcggatggaggaataaccacccaacccagaggacaaagggaaggagcaggagat

SEQ ID NO: 13624 - DNA, 1190 bp, Homo sapiens
gtgaaggtttggctccagatgcggcccacctgggcctcggcaggtgggggctgcctttagaacactctgtgcttttctctgagtacacaatgggagccgctggagggttttgagcaggggagtgccaggatcagtcctgggtgttaccagcctctctgctgccagtctgttgaggctacgtcatagccagggagaaagagctgtggcagtcatccagtgagaggtgggagagtggctggcatcccgatatgctgtgaaggctgagcaggcaggattggatgtggggtgtgtgtgtgtgtgtgtgtgtgtgtgtgtgtgtgtgtgtgagagagagagagagagagagagagagagagagagagagagagagagagagagaacgagaaactccaaggcttgggcctgagcaagtgaacaatagagctgtcatcacctgagactggggaagctgcagaggatgaggctgaggagggatcagaattcagttatggtgaccaatgaagggttttgaatagagggacacagggatgcactggctcaggagtttggtcatcacgttggccgccagagggagaacagaggctgggacagggaaccctgtggagtgtcctctctgtggctacagggagcaacggtcagatctgtggctggtttgaaagtagatccattttgctaaaggtggtatcacagattttggagactacagaatccaggccaggagagcaaagaacgacagaggtcccattcacagcagcgggccatcccgggctcctactagcttttgctgcttgggcctatggggatggtattctagaactttccatcttccaagacatactggaaatgtggatttttataggaaatcttctacttttcaaatattaagaatgacttcaaattaaaagtaataatcattttggggctgcagtaaaacttgttggtggagcaggcctcaggcttcaggttggtgagctgtcctccagtgggggtttctcttccaggctagggccttgtcctcccctgctctcccccactcccagggctggccacccagaatgtgcaggccactcatctctgtgactcgtagaacctgagaatgttggtgatggaaggggtgttcccctagttcccacatgcaaaaagtggggcctggagatggggctgtcttttttctccaaacacttgcccat

SEQ ID NO: 13625 - DNA, 1187 bp, Homo sapiens
ttgccatagggaaatccatttttcggattggatatataataaatacatgagagaataaggtatgcctaaatgggacaaaccagaatccatgtaaattttgaacctcacctgcaattttgaaagtcctattaatttaaaaaatagtaaataccttaattttcatgatagcttactgtaaggctccctagaggcaatgaaaatgggaatctcaataaaacgaatactaccatacatcctggcttcagagatgaaaacagagggagaggattggctagttatcaacagaagggtaaggaaaaaaagcacagagaaagaacagacaaggcaacaaaagtggcagaactgtaagggccaatacgcatccactgcttcaagtttttcagccatgttccattctccgagatttctggtagtgcttcaagaatactggtctccaaactcttcctgaaaagggctaggaatgcttctgcctgaagatcttacctattctttctgggccccgtgatctccctacatgattgatcaacctactatttcaactctttcaagccttttcacaaatgtcaacttcagtgaggcctctatttaaaaatgagcaccctacgaaatcctttcctcatttctgattatcccctgtgaatttacatctgcctactccgtaccctcagtttatgccccttgaacactcttgccgggcgcttctcctttaaatcttgcctggaaggggcggagctatgtcccagactcaccgagaggagcgttctctaggctccgcccacttacgtctcagtgggcgccctaacgaacccgggatacggtctgttcctagtccgctccggaaatgcaactgcgtacgggctggccgcgtaatcgtgacgacagcgcgccagcgccggctagccggacgccctaggcttccgcgagatcttcggtgggggtacgggtgttttacgccaggacgctgatgcgtttgggttctcgtctgcagaccctctggacctggtcacgattccataatgtaccacaacagtagtcagaagcggcactggaccttctccagcgaggagcagctggcaagactgcgggctgacgccaaccgcaaattcagatgcaaagccgtggccaacgggaaggtgaggttttcccaacggttgcccagttgcccggtcactaaattctgagcagct

SEQ ID NO: 13626 - DNA, 1186 bp, Homo sapiens
ggcacgtgttcatcactgctattatttctggctactcggtgccaggacaggggcctcagctgagggccccccagagcctggcaggcccagtgaaggagtgagatggggaggccacgactcctccccagtcagcagctgtcctgtggccatgggggcctggtgaggccagatcttcaggttgttctagaaaagtgagtattctagaattatgtttcaagcctcttggtttgcaaatactagtaactatttttaaaatgttttggtatttggcctggcacagtgtttgacccctgtaatcccagcactttgggaggccaaggtgggaggatcacttaaacccaggagttggagaccagcctgggcaacatagcaagattctctctctaccaaaaaaatgaaaaaattagctgggtgtggtggtgcacgcctgtagtcccagctactcgggaggctgtggtgggaggatcacttgagcccaggaggatgagcctgcagcaagctgtgatgccaccactgcactccagcctgggtgacagagtgagatcctgtctcagaaataaaaagtaaataaagttttggatgctttgagcatctggcagaaatcttcgctatgccccgctgatgtcctgggcccgatgtgggcgcctggccatggctcggtcactcctgacggtttttcagggcctcagacacctcttcttcttcttcttcttctttttttgagactgattttcgctcttgttgcccaggctggagtgcaatggtgtaatctcggctcaccacaacctccgcctcccggattcaagtgattctcctgcctcagcctcccgagtagctgggaccacaggcatgcaccaccatacccggctaactttgtatttttagtagagatggggtttctccatgttggtcaggctggtctcgaactctcgacttcaggcagacacctgttctttgccatgcctctgtctgaagagtatatggaaaggggttgcacaagcaatggttgctgttcctgttgctgccactgcggtgagggctgtggctggacgtccctcctggcactttgcctctgtcccctccatccgccgccagcatttttcctcccctccccttcctccagctcgtcccaagcctgcctgtccccagcgtggaggcgggacagtggaagactgggtgagtgaag

SEQ ID NO: 13627 - DNA, 1173 bp, Homo sapiens
ttctcattttgtggttttggttgttcttaataccttcataataatttaatttttaaaacataaacatatcttgtattacttgtattcttttataattttatctaaattgctgttgagtatttttaggttcacagaaaattgagcagatagtacagagttcccatatatgcagttcctactcacagtttacttattcatattttgcattagtgtagtacatataattgatgaactaatagtggtatgttatttttaactaaatttatagttgaaattcgagttcgctctttatgttctacagttgtgtgggttttgacaaatgcgcaattttatgtattccaccatgacaggatcacacagaagagtttactgccctaagaaattctattaatcctgcatcccttcctaatccccagacctctggtaaccactgttctttgtactgtctccatagttgtgcctttttcagaatgtcatatagttgtaatcataagatctagccttttagattggcttctttcatttaataatatacatttaagttttgtccatgtgttttcatggcttggtggctgcttccttttttatcgctgaaaaatattccattgtatgaacatgtaagtgtttattcattcaccttttgaagaacatcttgattgcttcctttttttggcatttatgaatagatctgctataaacattcacatacagatttttattcccagttttgtttcactgatctatttgtttattctttcgtgagtaccacattgtcttaattgtcgcagcattatagtcaggtggtcaagtcatatagtgtcagtcctctgactttgttcttcaatgttgtgctggctatgctacgtattttgcctttccatagaaacttaatcatttgattgatagccacaaaataacttgctggggttttggttggaacaatgtgtcctctgttctgtttctctttgtatgttacatgaagagggttgagaacggtgaaatactatgtgcactactttgctaaatgagtttataaagcagtgcaaatggtaatctttgggtacctggctatatttttatcagtataaattctgatttttcaaatatttcgatgtagacagggaaatcattcaaaactgtggattccattccagcagatgtagctaaaatggg

SEQ ID NO: 13628 - DNA, 1153 bp, Homo sapiens
aggagatgtgcatgtgggggacagtcttgaaggaagaatgtatacagtggtctatttccaagacaaagtgtcttaaattggcttagctcagcaaactacagaagaaacaggatatactaggccaccctgcttggatagctgatgtgtgcttgtcggcctccactttccccgcacttagttgccttcacccgaaccaaagaagttcagtctaagctgaaagtttactagcctgcaaaatagctcattttgtctgttcttatcagcctgcctgctacttaggtcgtaagttaaatacttaaaaagtccctgagctaactaggactgcaatgcattgtgggctgcaacaaaatacagcaagacaagcccccaaaaaaacacctgaagcccctacccaacaattaataggcgacgtccgggaaaattgtgaccccacagtactcggcctatgaggaactgggggagggacctgcgtactaggggataaattgcttgtcgaaactgtgctgggtgtgcctgtctgacacctgatcttgcaagactgtcattaaaagtctcactttcgctgttctctgggtctgagttcattctttagatttggatgggtaagtttgtttctcacagtgtggctcctgccctcacttctgctgccccccggggaccccctcggcaccccagctcggtgtgtccaggccttaagactaccatggtgctgatgggatgcttctgttcagggctggtgttgcaggtggtggagagacagtctggccagtgccaatgagtgcatgggtttgggagttgtttgtgtggcaccggccaagagtgtggtgtccagttcccccacacccagcaagtagtacagacaccacagaggtggttctctctgttctggcctgttgcaggttcggagggcagccctgagtgtctgccatccgctcaactcagtgttttccttttcccgcagacctcgcgacctgtgtcagcagagccgccctgcaccaccatgtgcatcatcttctttaagtttgatcctcgccctgtttccaaaaacgcgtacaggtaaccccctcgctctgcatctgctgcgccctgcagggtcctgggtgcccagccagttctcatgccacccaagctgctgtgtgcaggaaggtgtgtg

SEQ ID NO: 13629 - DNA, 1150 bp, Homo sapiens
tgacacactctttccaaaaagcaggctgctctagattcattctctggtttagcaaccagagaatgctgtgtaaccttgggcaaggagcttgacctctctgtgctctggtttctgtaaaaggagccagtggtctctctgacctcatgggattgtggttaagattcagttaattcaaaaaaagacttggcagggagaaggcccaacagggatgtcactggataccgtggcggggaaagctgggacgcagagaggtcagacactcagaaaaccacgcagcgcgtttcagtaggattccgccccttatttccatgtcttcacaccacctcgagatggagagggcagttcagagtgacctccagcgaatctgccctctccgtgtcgtctgcaggggattagtggggagtaaggggatagagaattatccaggagtccttcagccttgatggtccaagttcacatccgcttctgtgctaggtggccagagggcgggctctacacgagagcctcaggggaccctgcgccaggcgtccgaggccacgtcgggttgccgcgctccgggtcggactgcaccttgaacgctccagccctcccctgggggcgtaccgcccacggccgctgcgactggccgcggggcctgccagtcttcggctttgcggccaatcccggtctccccccaagctacgccctccgttcctctcgcctctgccccaccggtagcgccagtttcttcgtagccccgcccctggcccccagcgattggccgacagttctgcctgttttctgccaagattccaatcctcgcctgcctccaggccctcgcctcccagcgcctagcaccctgagggaccactcaggcaccccaggcctctcccaatagccccacctctgccaatcagcgattggctttaggggctgcccatctgcttcatactcgccaatcactgtcgcttccagcgctgactggccagggagcagccaatcggggcgtggcgtggacccctcccgtggcgcgctctgggggtgcgcgaggcggggccgtggcggctggaggtagcggcggcggcgacgcgtccgggccggtgagggggcgcggggggcgccgggggggcccaagcgtcagcggcccgcgcctgtcgggctgaactgaggt

SEQ ID NO: 13630 - DNA, 1100 bp, Homo sapiens
gtacaaaaggttgggtcaggtggggcacggtagctcatgcctgcaatcccagccctttgggaggccaaggcagaaggattgttgaagcctggagtttgagaccagcctgggcaacatagtgagaccccgtccctacagaaaacatttttttaattagctgggcttgttggcatgtgcctgtagtcccagctactcaggaagctgaggcaggaagatcgcttgaacccatgaggtcaaggctgcaatgaatcatgatggcaacactgcactctagctcaggcaacagaccaagaccctgtctcaaaaaacaaaaaacaataacaaaaaaagaaaaggttgggtcgatgacagtttctagcgactgatgccaccactctgtttacagaatcacccctctcctctggccctgatgttttatcatgatatcatatttacaatgcctggcaaaggcttcattcccatttggcatactacctctcaggcaaatagaacttttgaaagcctgtattatgtatataacatataggctcacactggataagctattttataacctgacttcttcaaagaaagtttacatcatgtttaaaccatgttttagattctatatttttaattaaaaatctaaggaagaaggatatttcacatttctataaactctaagatcttgcagcagaagcgaaactgcacatttaggggtgcctgcccctctactgatgctgccctttgtgggtcatatgtccttaggaaaatgaaagactgtgcactcttgatttgttggccagctctgttgacatctttcagtggttccttttatgtatggccactcctacagaggcctcttgtactttgggaactggtgagtctccctgtccctagggctttttagtcacatgtccatccactgtttcaatgtaacatgcatctaggcaaggttaacgattaaatggttgggatgaaaggtcatcctttacggagaacatcagaatggtagataattcctgttccactttctttgatgaaacaagtaaagaagaaacaacacaatcatattaatagaagagtcttcgttccagacgcagtccaggaatcatgctgga

SEQ ID NO: 13631 - DNA, 1100 bp, Homo sapiens
gcacatgtcatgaccacacttttcaagaatgatagtgtttctcctaatacgatggttcaacaataattgaatgaatctaatggtaagaatttcagaagaaattatatcaactacatatagtagattcaaggcatttttcaaaaacacaatgccagtccaccccttttcactatacaattgaggaaaatgaggtccccaaatgttaaatgacttctgctgagatccaatgaattaaaggcagagcagaggctaaaatctagatctctttgttgttaaaatacattttaatttgacacagatgatgagtaatgctgacccagaggtaaatctgaactttcttttgttactattcttaactttggcttcaggatccaagtgcctagaaagttacttcctaaacttgatcctcacctatgttgcatattatcaagcatttggtggtgttaattctttcatgtccaattaaattaaagcagtaattttctttctagttattgctagtagagacactggtagattctgccttggtagaccttcctctgtcaacaatttacttttgtcttcctttcttttaaaacatgtatcccactcacaaatacctaaatttccttgaagactgctgccatgtcttaagatttctttttttttccatagtgactagtaaaacctgccattttcattatacataggcactctataaatatctgctaatttagcaattattagtaatttcctttcttctcttccatttcttcctttcttgtattgggtaaaggaacatttcaggattttcttatgtaaagttttcaggagtttctttccttcctcccttttacagagagcatacaaaatgtagatgattcatattcacttatttcatttaaataaaattataatgatgtatgttgtgttctgtttgcagaacagagtgttctgaacatcaacacaaagtggaagaaccttaagctgaaggtacagtatattatttacactgaaggggcttgtgtgtggacaagaaagcgctgacagctcaaatggatcccatggaactgagaaatgtcaacatcgaaccagatgatgagagcagcagtggagaaagt

SEQ ID NO: 13632 - DNA, 1100 bp, Homo sapiens
tccctcataactctgcaatcctctgggcccagttttctttttcctctcccggttgatgacactaggcccattggtggtacggctttgggtttccttcagtctcaagatctcagtcagggtgggtgaagtggaagaacaagccttcttgcagaccactggttggttggcagcctttgccatagctaatctggttgttttcaggtcagtgacagtcacttttaggagagggttcgtttgctttcaaaatccatctccccgttcctctcagggttctttgccccaaaggactttgcccttccttacgcagtggacaccttggcaccctctgcaaacagacagtcccgcagaggccctcgacgagtgtcactccatctgtttcgcgctcctaggagaggtgtagcagaaagcagtgccccaggcctccacgcgacggtgaagcaggaaccaggggctgccagcagagcagcccaggtgcgtcgccttagggacagagctgccaagtgccgagctggggctgccagagccgagccgggaacggcatttgccagagccgaggcggaagccggagcatttgggggacgggaccgcgggaacccggaaacgcctgggctgcaccgagctggcggtggctacggcgacgggagccggcggcgctgcgggtcagcggtcgcgtaggacccagcggactcggcagcctggggcgcccggcggagctgaaccgcggcccccggtggtgggctcagccggtcgagctgcgcgggaggtgagtcctcagcgcacctggggaggggcgggaaccaggaggctagcggctgcggggcggcccgggaagctcctggaggaggaggaagaggaggcatgcgagggggctgatgtgaagtctgtaggggtgaaggggacggtatcgaagacctgaaatacagtgctagctaagtaggggtgggagcagatgaggtgacacgttgtaactccgacggacgacgtgcggaatgtactgggtggaggaggaaaaaaggcccgaggagaggggtgtgtcaagcgaatgaagacggcagtgtgtgcctcagcgcctggtgcgtgcggagctagtgacgggtggg

SEQ ID NO: 13633 - DNA, 1098 bp, Homo sapiens
tgcttttgcacgtagatttggtaactttcactttacatttgtgaatgtgtaattggtgcaaagtaaattttttttcctgcaaagtgaaagttgagtagtcacaatcatgttatttattttgttcatttagttactttgcttttaatgtatatgaatacatgctcttgtaaacaattttaaaagacattcaaatttttttttagtttttatatactcagaatatattttggttgttaaattaaattatgttccctttttcacagtaacaaaatctgactcaggagaaatataacttaattcttaggaaaacaagggtaagtgagctggaaagcaaaggaggcaaaaagtgaaatatatttatttacagtgtacagttcatgtttatgaacatactaattttaaaatgtcttaaattactgatctcaaaacttttttctatgtcagtacagataaataaataaatatacatattaggcaaaagcaacatcaccaaccttatatttcccattcatggtcaaattttcaaaggaaagtaaaagctgagctttactgagtgagtgtttactgactaataaggcaagaaaaaacatgatgagtgtactttacatcttacttttgtgggctcttaatttttttctctagtttgttttcagtaaagacagtgggttttctttaaaataatttttttcttttaaatttgcacaaattatcttaggtcagtattttggttttaatcattaaaacatttttagagtaatgtaatttaacaaatattttaagtgattatgtttccagaaatggattctttggagagaactcggatgactatcagttttggccctgtaagatcgtggagatctgtaagatagatacttatataacttacataaaatatatataatatattacttatataacttatataactagctattattttatataactaactataatatgacaaatcctttgctagtagtactaacaacgttttataggagcacaattaattttacttaggataagtgttgttattattgtttttattgttgttctgttagttactcaaaacttcattctaattgtgccctgagtttg

SEQ ID NO: 13634 - DNA, 1097 bp, Homo sapiens
ggtgatctaggccagtcaatgaaggggggcgaggagaaagttcacatcccagctccctcacttactccctgtgtgacctcactcaagagggtttatggagtctagatctgctcatcttcaaaatgaggatgatcacgatgaaccaacctcactgttacaaagattcaaccagatcatacacacctagacttaatcttcccatatatgaccatgctcaccaaagggtaactgtcctgtttactaaggaagaatttccctgaaggaaggacaggagggctactcatcccttctccactcacacccaccccaggatctgcctctgtgcctaacactggagtttaccccaatctcttctgcgactgttccctctgcctgctaatagtagtagcccctgacaaagcaggaatcgcccttaaaggagacttaactcaccctcaaatgtgatcttctcttcccaaacactccctttccactggcaggaaaaccaaatccagaaaggggaactaagtacacagagcaggagagatgggagttcagggccactcacacatgtcccctgcccactgtctgttttctgtcctctgtagatctttatataaaatgagaaacataaacaacaatcataatattaatagggatgatacaatcaatctagtgggtttccctgaggatctgggttggaaaccagcggacaacccttgggacacttgagatttttccaccatttgggggttgttattactatttctccagacctagccaatccctctgccaaccgctaactccaggtactcttctccaggtgtggggaaagttcccctgaaatatggccctggtcttccacccctttcccaaccagagatgggcagtggaggttccatggcacccatcctggcctcactctgaggttccaatgaggattctgggcatcaagagatagctctgggcaaaagcaaaatcaagtcagcccctgggcccattgctgggctgctgggctttctgggagcacctgctggcttgctacacactcctcctcccagaaactccacacccacagccctgggtcttcctagccccgagactttcaagtccatatg

SEQ ID NO: 13635 - DNA, 1090 bp, Homo sapiens
tctggggtttgttttgtttttctaaaattgttcttgagccagctgtggtgtaagtggtaatgaaccccaatgggtatcagaagatctctgctcaaatcccggttttaccggcaatgagctgtgtggcactgacaggtgtcctgttctcccagagtttctttcccaatttgaaaaataaaaaatgataatctttatactccagtctcttttaatgatgaatatacatttatatatatacttttatatatttaatataatatttaatagtataaatatgtatttatgttattattatgtaataatgtatgtaacactccctgctaattcagtttgtctctttgacatgtaaagtaaataatcacctattattataataatgtaataataacacaaatattattatgtaataacatatatatttatgtatattgtttatatacatttaaatatatataaatatacatttattagctaataatttgatatatgtatggtaattcaacatgtatgagttatattcactatttcatgtttaggcagctgtattttaagtgaactatactaaatatttgaaaggcttttgttatcaagggctaagtctcctattttttgatatagcattacaatgtacattttttatacacaaaatatagaatacactgatttccctcaaggtcataaattcccaactggtcattaatctgagaatattgaattttgagtatattctaacatagaatcatttacttcagtgtttctccatcatcacagcacattggaacaaccagggacttttaattaaaaatacctgggctccaatccaatacaattaaaccagaatctcctagattggcactggaaagaaggagtaggacaaaagaacattttatttctatccatgggccaaagtccactcagaaaaaaagtataaattggatctaggtgattgtttactttacatgtcaaagagacacacactaaattagcagggagtgttataaaaactttggagtgcaagctcacagctgtcttaataagaagagaaggcttcaatggaaccttttgtggtcctggtgctgtgtctctcttt

SEQ ID NO: 13636 - DNA, 1084 bp, Homo sapiens
atgtaaatggggctggaattctttcttggaaaatagaatcaataaacatattttcagaagtaaaatatattgattgagaactattgtctaaatattccccaaaccctagatgttccttgtcaaatatacacacagaagatgtactgtgctatatagatgaggattgatgataggaatatgtagatctacacgttagggataattttatttcagtttaatgacatcagaattcaaaagaaatgaaacattatacatgtaacaattattgaaatgcctcccatgtactagcagctgtactggttctgcccttgggaagtttattagcatagctgggacacaggcctataaatagataattaaagagaatattgttaaaggccatataagggttacgcctagggggctgtcaggatatgtcataactccccacatttcaaattacaaaatttgctttactccaaaataaaggtagctttattgtacatttaagaaaacttgaaattgtaaagtgtttatgtgaaatgttaacttacagacttgatttaccaaatttatagcagtaaagtaagtcccatttttcagaatatgaggtatgtgatttcagctccttaaatgggatacctcacattattattacagtttaaaacctatgagattttcttttctatttttaatccttctcttaatgatctcatttattgtctactggaaatcaatttaggaaatcatgttagtccactaagcacttcagataaggctattccatgaagcattccaagattatcacaaggaattgctttcatatgccataaaagaagaaataagcagaatatggcctgctgaagaaggttacagttttacagcccctcccattgcagctcttaagtcactcagttacagttaactttggattagcactcacagattgaaagcaaaacacatcaaaacactcatcacgcactctgggcttgtggtgccacttgtatgtgtgtttctaaatcaatgatgagggtatcagaaccaatactggacatggacatggcaaattacagtgaagttttggacccaacttacacaactttgg

SEQ ID NO: 13637 - DNA, 1083 bp, Homo sapiens
acctgctcagcctctacctctctgcacagaggtggaggcagaggccctgtcgagggtcggccagggcagccgcaagctggacggcgggtggctgaaggtgcgccagttccacgggctgctggtcaaacgcttccactgcgcccgccgcaactccaaggcactcttctcccagatcttgctgccagccttcttcgtctgcgtggccatgaccgtggccctgtccgtcccggagattggtaggccaccggctggacaggggtgctgggcttgcctccccccaccgcccgctgggagccctgatgatgcccactcctgagcttcctgactctgggcctcaccccacacctgaggctgggcacgcaccggggttcatccgggagtcctgtctcctcgggtcccagaccccaggcgtggatcccttggggttgggggaaggggaccgaggcttgggggccgctggccagagggcagaacctgctcaggcctccctgctcgccctgccaggtgatctgcccccgctggtcctgtcaccttcccagtaccacaactacacccagccccgtggcaatttcatcccctacgccaacgaggagcgccgcgagtaccggtgaggcctccagcgggggcagccttggtgggtggggcgagtgaaggggcggggacagccttggtgggccaggcgggcgagggggcggggctggcgaggggcggagactggcagccccacctcacactgtcggtgcccgcaggctgcggctatcgcccgacgccagcccccagcagctcgtgagcacgttccggctgccgtcgggggtgggtgccacctgcgtgctcaagtctcccgccaacggctcgctggggcccacgttgaacctgagcagcggggagtcgcgcctgctggcggctcggttcttcgacagcatgtgtctggagtccttcacacaggggctgccactgtccaatttcgtgccacccccaccctcgcccgccccatctgactcgccagcgtccccggatgaggacctgcaggcctggaacgtctccctgccgcccaccgctgggccaggtagtggttcagggggc

SEQ ID NO: 13638 - DNA, 1082 bp, Homo sapiens
ccaaccccctttcttgatttaaccagcccccactgtccgggaccagagtgaaagcgaaagcgctttagagtagcttcccgttgacgcttccagctaagagtcaaagcacccgctttttccaccagcctcgcgtgcctgttcccttcacggacactctagacgacccccctcagaaaagaaatactctatgctcattgcgggttgcaagcgctggctgctacaggcgacctccctgcgctcccgttggtctctgcattcacttctccgcgcgcgcttccagggtcccctggccgctgcatctcctccacccctctgccaaccctcaagcccagacccattaccccggtgtggacttctcccgcccggggtaagtccccggttggtgctcccgcccgcagcatccctgcaaggcaccgctctcctcgccgcctggggcactggtttccaacctgggacagcgcacaacgcgcagccgacagccccgccccttcgcggcgccgccaggaggcgcctgggtgctgcggggctgctttgcgcgcggcgctaacgtgtgtagggcagatctgccccgagacaagtgacgaggcagccccgccctgaggctggggtgggaaaactggtgcaagtggaaaggcaggaggcagggagaggcgagaagggtgtgcgtgatggagaaaattgggcaccagggctgctcccgagattctcagatctgatttccacgcttgctaccaaaatagtctgggcaggccacttttggaagtaggcgttatctagtgagcaggcggccgctttcgatttcgctttcccctaaatggctgagcttctcgccagcgcaggatcagcctgttcctgggactttccgagagccccgccctcgttccctcccccagccgccagtaggggaggactcggcggtacccggagcttcaggccccaccggggcgcggagagtcccaggcccggccgggaccgggacggcgtccgagtgccaatggctagctctaggtgtcccgctccccgcgggtgccgctgcctccccggagcttctctcgcatggctggggacagtactgctacttc

SEQ ID NO: 13639 - DNA, 1082 bp, Homo sapiens
aggggttagagcggttaactgaggggagcttgggtgaggggtagagggaccccggccgacgtctttctccttcctaccccagactttcccctgcctccacctccccttgctggggatggcgacgatgcagagggtgctctgggaggtgccttcccgccgccccctcccccgatcgaggaatcatttccccctgcgcctctggaggaggagatcttcccttccccgccgcctcctccggaggaggagggagggcctgaggcccccataccgcccccaccacaggtacggaggcctgggaggggcggctgcactggacacccccaaggagaggagaagagggccctttcttcttacctcccctgcacctctgccttgggggtggggggatagaggcatggaataggtgctctgacctctgaccctctagcccagggagaaggtgagcagtattgatttggagatcgactctctgtcctcactgctggatgacatgaccaagaatgatcctttcaaagcccgggtaagggaccggagagtaggaaaagcagggctcagggccagagagactgggcatagaactaaggaggatggtgtcctcctgactgcatctctcttccctctcccaccccttgcaggtgtcatctggatatgtgcccccaccagtggccactccattcagttccaagtccagtaccaagcctgcagccgggggcacagcacccctgcctccttggaagtccccttccagctcccagcctctgccccaggttccggctccggctcagagccagacacagttccatgttcagccccagccccagcccaagcctcaggtccaactccatgtccagtcccagacccagcctgtgtctttggctaacacccagccccgagggcccccagcctcatctccggctccagcccctaagttttctccagtgactcctaagtttactcctgtggcttccaagttcagtcctggagccccaggtggatctgggtcacaaccaaatcaaaaattggggcaccccgaagctctttctgctggcacaggctcccctcaacctcccagcttcacctat

SEQ ID NO: 13640 - DNA, 1081 bp, Homo sapiens
ccaatcaccaagttattgaaaccatttttgcaaaattttaacaatgagaaaattctgacatctcaaatctggccaggcacagcggctcacgcctgtaatcccaacactctggaaggccgaggtaggtggattgcctgaggtcaggagttcgataccagcctggcaaacatggtgaaaccccatctctactaaaaatagaaaaattagccggccgtggtggtgggcacctgtaatcccagctacaagggaggctgaggcaggagaatcgcttgaacccaggaggcggaagttgcagttagctgagatcgcggcactgcactccagcctgggcaacagagtgagactccatctcaaaaaaaaaaaagtaaaaataagcccggtgccgcagctcacgcctgtaatcccagcactttgggaggccgaggcaggcggatcatttgaagtcaggagttcgagaccagcctcgccaacatggcgaaaccctgtctctactaaaaatacaaaaaaatgagccgggcgtggtggcacatgcctgtaatcccagttacttgggagggtgaggcaagagaatctcttgaacccaggacgcagaggctggagtgagctgagatcacaccactgcactccagtctggggtgacagagtgagacctctccaaataaataaataaaaataaataaaactaacaagcagcacgactccaaaatcagaaaacttgtaacgaccaaaaaagtgcaaacgtgccttaaatcagtcatgtgcgacaagcagctatagctagggtttggccgcaggctcagagaagcgcatgaatgagctaaagccacaaagcgcggggctggaggtttggctcccaagaagcgaggaaatgggttcggaactcttctgccaagtcccagtagatctacccggtaaacttccggtgagtttccaacttccgtgcggggcagcagcttcggctggtcctaagcggaccggaagttcgtcaagtttcacgctccgcccctcttccggacgtgacgcaagggcggggttgccggaagaagtggcgaagttacttttgagggtatttgagtagcgg

SEQ ID NO: 13641 - DNA, 1081 bp, Homo sapiens
gagctcctctgtggttcaccaacccctcaggccgcctaagtgtcttctgctgtcgcagctttggggacagaggggtttcggaaacaggggcctcttgtctgcaccctcccctcccactgacaggctggcagcccagggcagccacctgaggagcgtccctgtgtctctccatctgcagagcaggaaaagcctgcgggtcggtggcgccacgctggggcgagacccagcttcggctcaggagatctcccacccagccggactcccgctctctgcccgcggccccctcccacactcccacctcgccccgcgatctcactgccccatcgaggcttccgggcggaggagaaaagttttccggcaggaacccgggaaggaagccctgggaccctggctgaaactccgggtttccccagtgccgagtcccttccccgccgcgcccagcgcctgcgccccgggaggcggaagcaacaggggggttcctccccgcggcctctgacctctgccctctgccctctgcccccagggtctggggcccgggcggaggcgcgagggggcagggccggcgcgcgggtgcgagcgcgggtgtgggcgcggggccggcgggggctgcggccgcggggcgcatgctcacttgcgccggtgacgtgcgcgcccggagcaggggcaggagccagcggggcccggaggctccagagggcggcgggcaggggaggaggagactcgggaggagcagagcgcaggctccgccgcggccggggtgctccagccgagcccaaccgagcgggcggaccgacggggagagagaaggcgccagagcgcgcgcgcgcggccccgagcagcagccttgccgccagtggagcagctgccgacgcgcggggccgcggacccagcattcgccggccgggccgggcatgagcgcggaggggccgcggccgccccctgcaccgcccggcgcgccgaggccgtgaccggagcggggggcgcggccgcactagtaccccggagcccatgggcgcgccgagccgggcgcgggggcgctgaacggcggagcgggagcggccggaggagccatggactgcag

SEQ ID NO: 13642 - DNA, 1080 bp, Homo sapiens
tacagtgacctagagccagaggggaagagggagggtacaagaggagagttccaggcagaggggcgagcaggtgagtaggtgcaaaggccctaagcaggaaccagtttggctccataaatatttgttgactcaatgaacgatagaagattctagagagaattgattgcacagaatcacccatggggactcagaggcggagtccaagctggtttcggagggggctgggggccggaggttggcaggtggggtgaaggatgggagccgctagctgctggcaggaaaactggcttcagtgaagatctggtctggtcctcttggtttgtttctgtccagggagtggacaggacccatgtaagggccctgggctatcccagaacccatctgggaattctgaagagaaaaagtcctgtaactggccgggtgcggtggctcacgcctgtaatccccgcactttgggagactgaggggccgatcacgaggtcaggagttcgagaccagcctggaaaacatgatgaaacctcgtctctactaaaaatacaaaagttagccgggcatggtgatggggacctgtagtcccagctactcgggaggctgaggcaggagaatcacttgaacccaagaggcagaggttgcagtgagccgaaatgagatggcaccactgcactccagcttgggccacagagcgagactccgtctcaaaaaagaaagaaaaaaagaaaaagtcctcataagtagggcagaggtcacggcagagtggaggtaccccagacttcgacctttgctcactgagggctggaaaaccacaaaacacccagataacggtcttccctcccctgctcctgcctgccccagtgtcactggccctcaaccctgtctctccaccctgtccaccaatcagcacctggaggtgggctgggagctgcctgtgaccgcttcagcatcttttgggagtggtgacagagccacagagggctgtgagcttgcccggccccaggtaacgctggcggtgggtgggcctccagcttggagcagagaccccccgaggcatctgcagacagaactggatggacccatgaatac

SEQ ID NO: 13643 - DNA, 1073 bp, Homo sapiens
ttcagatcacagctgtttacccagagaagggcagagccggtgctgctcgaaggcgggggaaagggcctctcatggccaaggacaaggctgggccccgaggcagggtatgggccgagggtcctctctgttctgggggcagaaaggaccaagcaccgtgggccacgcctggcatggagatgtgatgaggacctgccccaagcctcctccaccccctgcccttgggccggggagacattacagctgttgccgtggctgttgggctctgagccttcacctgcccaccccacagggacttccgagccccaggggtcactacaggaagtcatttctgagcaagtgacacccacagccctaagcccagcagacagacctcccaccagctcccttcctccagggagcaaatgccttcagaccgagatctgccccggggacccccgtgcctccctgccaggctgcgtgcactgggccctgctccagggaaggagacacaggagatcacgtcacatgcaaacaggctttgtttgggctggctcagcctggtgccagagccccagtgacgtgtgggtgggacttggccctggggccatggatggcacagggcagggggattatctcccactcaggccaagcaggggccggatctggagaagcagaggttttagaaagcccactgcttcctggtgacagatggggcttccagctgtccccagccccctctgcctatcccagctgtccaccacagccaggaggccaggcagccatgggtaatctcgccctgcccggtgcactggccatacggggtaagaggcctggcctcaggtcccctgcagccagcttgacagcgtcacctcgggcccccactgtcaggggatctgggcacccaccaaggcccctctcttctgagcctctgcccactgggctctgtaatgtggactggcccctgctccccccacatcccccgccggctgctggtggctgggcagggctctgagaatcgctcccagcctgggaagaagcctcccacgccagggccccggacccaggagaggccatggaaagcctgaaccccagct

SEQ ID NO: 13644 - DNA, 1064 bp, Homo sapiens
ttttacagctcaggatggtgacacctgagaccctgctccgccttctcccccggcacccatcctcccgcctatctaggtggtggcgcagctcgccagggctccgcgcctctgtccccgcctccctcccttccccctactgagaccccctcggggtctcgggagtgaagcgacagagaaagcgttttaataaagaccttgcgtcaagtgattggctgtgacctctgccctcccagcctcgcgccctgggctcctgcttaacccttcaatgtccgcccagcgcattaaggggagcgagtcgcctggcgactacttccagagtccccaggcattacgtgagcccgaagcagggtggaggggtggggggaccgtgccgcccccgcccagcctctccgagttgttccagcagggggcgccgttgcctcacttagatccctaacccccggaaccccgcagctcccaagcccctctctgagtacggagtggtcccactggatccagttcagggttcaatggagctagggccagctacggctcaagatctggggtccgcctgcgggtggggtcgccaggtgtccggcaccaaggagttgaatgcaccgagtcaggttggggatgggtggggaacaggcgagacgtgaggaactcgggtgggggacagccatacacgagccctgagcatctgcgcccgcagctagctccccccgcctctgcggagagcgcgattcaagtgctggctttgcgtccgcttccccatccacttactagcgcaggagaaggctatctcggtccccagagaagcctggacccacacgcgggctagatccagaggttggtggcgggggcgcagggccccccaggtgggggggggcggagcgggaggcggggccacttcaatcctgggcaggggcggttccgtacagggtataaaagctgtccgcgcgggagcccaggccagctttggggttgtccctggacttgtcttggttccagaacctgacgacccggcgacggcgacgtctcttttgactaaaagacagtgtccagtgctccagcctaggagtcta

SEQ ID NO: 13645 - DNA, 1053 bp, Homo sapiens
tccttctctaatttgtcctggtcctaattctaacttagcctgtgggtacagtgatagtaacctggtgaaaataagagaaagacaagataaagttgaaggctataaataatttattaattaatggcaaattgatttttctaggtcctagaataaagaaagaaaagctatgatgttccagagtgctctgctgtaagcacagataatagccaatggggtacatattattacctttcattttacagatcaagacaaagagagtcaggaagtttaagacttaagtctttaaagaccttgtaaggtcttattatccctgtgttccaggtgaagttcagaaatgttaaatgatttatgaaatgtttcatggctttctcgtggttgagccaggactcgagcaaaggtctctgaattcctagtcctttgcttctttctctccacatccactgcctcagacaattgcaggcacacagccttcactctcccttcttcaagaggaagacactgctgaggattgtgtttgcattttacagattccatctcacgaattaaaaatgctgaggtggtaaattgttatcaattctatgtttcccagaaatgtttaaccttaagttaaaaaaaatctaagagataaaacagcatgttatctggccagtccattccacccccagtggttattaatttcagaacacatctgaattccttctctgtggcatatgctttaggagaggagcagacagctcttagctagggtcagatttcaaattctcatctcttggtgccaataccaccaccagattcttctttgaagtcaacttttgagatcttcactaagtacacgttggtgtctgaagattcacacgagtgcctctggtaatcattttcttcagggaatcacagtctctcctctcagcaaagcatccactgtactgaactttgcttttggaaacatcttcttcctgagacctcgttgaaagaaactctctggtgtcatactttccaatatggaggtgaagaactttgcagtttgggattatgttgtatttgcagccctctttt

SEQ ID NO: 13646 - DNA, 1052 bp, Homo sapiens
cacacaagtcctcgaataggaccgtggttagaacggccgatatttatcagtgggaatggtaaacatttatcaagtgagcaaccaagttcagttacttaatctgagtctcattatgtcttctataaaatacacattaaaaatagaaagtaaaaacgtgggtaaagtacccagtggatggtcattactcagaaaaaggtattttaaaagtttctcccttattctttctgagtacagcctgtagtacttgaaccacttctctttcgtcccctaccacgctgttctgcaatctctttttacctgtctcactctcttcctgtactgtgtgcctcatcgggacttctaaaggcttacggcctaggtctttgtattccgtgtctctggcacgcgcctctgcacacagcaggcctgaaccaaaacttgtgagcaaataggatgtaagggggtgaaggaggtgggcgcgaaacgggttcgaggtcgcgcactccgccggtttctgccgccagcccaaccccgctgggtcgtacctaagagatcgccggtgtcagagcgcagcgggcaccttcacaagcatcttgagggacaagcagagtcgctcctcccgcagggcgcgggctaagaagtgaggaacccaaggggctcccgtccaactaagaagcgaaatcccccacctccaggccttcagggctggttcttgggaaatcctaactctttcccttctaaccccttccttggcccttcttcctgcccgggaggatcaagggcgctgttttccagaagctgccgggtcggaaacggtgggggaacggggcggtacgcgtgggtggaggataggcggggagggggcagtccacgaacttttgtcattcagcctgggagaccacggtgacattcctgtctgcgctgcgggcaggccagcctctccggccctggactagggggcgccgccgagagaagccgccgcaggctgcagagtcgccgaccgcgctgttcgcaggcagaccccgggctgcccaccgcggcctagcgcgcgccggatggcaggagaagtgtcc

SEQ ID NO: 13647 - DNA, 1050 bp, Homo sapiens
gtaactagtgccgacgtcaaaggtgagcgggacgcccttgcccccgcccctctgaggtctccacggtttccggtacccgcgcccggccggctccgccagccgtttcgagagtccggccggccccggccccgccatcctcggcttgcgccgccaccaccggggatctggttacctgcgcgggtcgccctgcccggtcccgccccgccccgcgctcgggttccaaactccagggcggcaaccaaagtccgtctccgttatttccagggcaaaatgcattaggaaaatcgcggctctgggcccgtgaccccgccctgcagagtcctccgagggccgccgggtccctgcgcgggccacaccggagagcggaggaaactccaacccccatctgtagttgctgcctccgggcaccgaccgcttaccgctataaataatctttggcctgcggccaccccgcggggtctcgccagcccgtggcccggagcctggaaatatttattccgagaggctcccgagcgcggggtgggggtgtgggggtgggggtgggggcggagactcccgcttcgggtccagctgtccgggatacctctttcctctcgaaagtcattaccaaaaaacagcctcctgggggtgcccctgggcctccgcctccttgcattatttattatcctctaggccctacttcgcagttcttgtgcacgctatgaaaaataaaacctgcgtgctcgtctgtgtgagtgtgtttggtggggagagggggcaggtgactgtaccccgggttggggtccgccgcccctccctcgcgggccctctgcagaagtgcaccctgagagagacccgggtgtggctcccgcagggttctggcttccagtcgtcgcggagggagaagtatggcaacgtgttcaagacgcatttgttggggcggccgctgatacgcgtgaccggcgcggagaacgtgcgcaagatcctcatgggcgagcaccacctcgtgagcaccgagtggcctcgcagcacccgcatgttgctgggccccaacacggtgtccaattccat

SEQ ID NO: 13648 - DNA, 1037 bp, Homo sapiens
gtgtcctcactggctctagtcctgcaggcctggctctccagaggagcctgccagctcctcttctgccccctcacaggcctgaaggagaccctccagatggggatccaggcctctttcctccaggccagcctcagaccctacgggggacggttctgggaacgtcctctgtgccaggtgtctggggactgctagccttctgggggggctggatcctcaaatcgtgagccccaagcagtccctttccaagggattggagtgagaacctcgtggggcagagccagatctacctaggacccaaggggagtgtctcaggcaggacccccacaggcaaagacacacacactggccacacacttgccttcggatgtgtgccaagcagctcaaaaggatttaaagtccagccaggtggggtggctcacacctgtaatcccagcactttgggaggctgaggtgggcagatcacttgaggtcatgagttcgagaccagcctggccaacatggcaaaaccccatctctactacaaatacaaaaaaaattagccgagcgtggtggcaggtgcctgtaatcccacctgattgggaggctgaggcaggataatcgcttgaacccaggaggcagaggctgcagtgagccgagaccatgctactgcactccagcctgggtggcacagcgagactccgtatcaaaacaaagaaaaagatttaaagtccttgggagaggtggagtccacacctctcttcaagatgtggcatgaaatggtgaacagctgagcacacagggcaggagggccccgggggaccttgggcagcccgggaaccagcatggggtagcaggactgaccggctcccggggcaccttggtaatgctgcaggtgtggccagttgatcccctgtggagacagtaaagattaagaggatcataaactgcgtccagcggctgccccgggagaaatctcctcaagccagagcctgtgctgtgaggggcttcgggaccttggggcagctcctgagttcagacagagttcaggaagggagaca

SEQ ID NO: 13649 - DNA, 1032 bp, Homo sapiens
caacaggttttcctaccttgtggggaggtgagaggtcagggtgagtgctgggtttgaggctcagctgtgctgtgtgaagattgagaggagcccacctcatcacatggacagaacgcacaggcttcttctctttctcccacccaggccatcatctcttgcctggttgatacccacagcctcccctttgggctttatccttatccccgtcatagctgccagagggaccctgtgaaaacactccccagcctgctcattcctctgtcctaagcctgcatggcacagagcaaaagccagttgttatgggacctaggaggtcttgtgggatgggccccagcctgcatcttcatcctcttctccccaccctactccattcactctctgcctatcgctcaccagcctatgccacctgcctcagggcctttgcactgaccatttaggccactttccaggctcttttcacacgttgcctcctctgagaagccctccctgaccactctgcccatacctcatgcctcttgattccccttacctggcctgtggtttcagcactttccctgtgtgtgtttgtttttcttggcatgagggcaggacctaagtgtctgttccctgttgattccccagtgccaggcatgcagtgcaaattgtagaaatattttttgcatgaaagaatgagtgattgaatgcggcaagggtctggaggctgaggaccaggcagacagacattcagagttgctggaacgcgacagagacagggagtcagactggtcatgcaaggtcttgggcctgcccttgggtcctggggagccacggaaggttgtgggtgccagagggttgcggtcagagtcacagtcaagggccttctgagacctgtgccccctccccaccctccctccccacctcctcaggccagctctggggtctcagcaggtggtccgcaacatgacctctgagttcttcgctgcccagctccggtcccagatctctgaccacaccactcacccgatctcctactacaagcccgagttctacacg

SEQ ID NO: 13650 - DNA, 1026 bp, Homo sapiens
gcggttctggtttttactctgtgaactttatttaaggacattcttttttattggcggctccatggccctcggccgcttgcacccgctctctgttgtacactttcaatcaacactttttcagactaaaggccaaaacctaatcgtacgcatcgtgtccttttttttctgctgccgtggcccccgacttggtcccatctgtagcatgtggcgagcccccatgtgagtgtgtgcgtgtgctcgtgtgtgtcctgcgcgtgtataggagagcccagagcgagctgctggtaggccggcctggcgggcgtcgcggctgcccctcgccccctcctgcagccagaaatgatctagttcccccagggacaggttgggaccggtctggctggcctgaagcctggagtcgggcaggacgcctcctgcgctgctccctggccggctccccgctgccgctgattggcttgctccccgcctcgtcacaatcacttcccggtcacgccattgaggctcccgccgcggccgcttcccacggactacgcgtcccgtgcgtctctgcggcggcggaagcggaagcgagtacggaggtaccagctggtctccgtaggggggtagggggctccatgaatggaagcggcggcggcggcgggagcggcctgagctgggcgccggggccagggccgggggctgcccagggcccgcgccgctgcatgggggcggcccgcgggccctgagaggaagggcagacaggcgggccgagataggaggggcggggtcgggcggccgcaggccggaggcgcgtcgggctggagccggtcacgatgccccgaaggaagcaaagccacccgcagcccgtgaaatgcgagggggtcaaaggtcaggggtcaggggccttgaggggagaggagcgggggtggggtcagtggagtgggctcaggtcagggtggagggggactcctgagggatgaagtgggcgatccagactcctagcttcccaccgaggcactaagggaatcagagtgggtcagcgagtac

SEQ ID NO: 13651 - DNA, 1024 bp, Homo sapiens
aggttgtcatgtaccagaggcatgagtacaaatgatgggggtggggacgggggacctgaggagctgggttcaagctatgcttccctgcttgctggcactgagaccttgggggaagtcatgttactggcctcccttcagctccctcgcagcttgggtttccccatcagaaaattggaagcgattagaacctgtacttagcaagagttctgggacatcccttgtgtgaaagtgccagatacgctgtaaagcagtacctaggagtgccccacctgggaccacttttgaaaatgtccaagccccaccccaccaccaccaccaccacaaggtaacgttctgccccacttttctcatccatgttgggtggagacttgcgccatccctcggctctctacatccatccgcaccacgcccaggtgaactcacactcgggaccctgaacccgcccactccaggccttgcgggcccttctctcctcttctgcacgccccaccctcctttcccacccagactccagtgtgcccacaccccactccccatcttagcctgcctttcccctctcccccagcgcacgcgtgcatcagggcactcacgaagccaccccggcaacatctgggagcacgcgcctccacatctggaaggtgggcgcaagcgtagcagggccggtcgggttcctcgccgccccccggccccgcaggtggtggagcagggcggggtgagggagggggaggccagcggggctgggcggggcccggggggcgggggcctgacggccgggccgggcggcggagctgcaagggacagaggcgcggcaggcgcgcggagccagcggagccagctgagcccgagcccagcccgcgcccgcgccgccatgcccctggccttctgcggcagcgagaaccactcggccgcctaccgggtggaccagggggtcctcaacaacggctgctttgtggacgcgctcaacgtggtgccgcacgtcttcctactcttcatcaccttccccatcctcttcattggtgagtgc

SEQ ID NO: 13652 - DNA, 1022 bp, Homo sapiens
agatccaacagtgcctcatcattcgacttgggtgcacacgggagaaggtggcattaaaatccacagggaactcaaaatatggaggcaggtagatgaagattcaagagtcaggactccctgtgaagtgagtgacacttaagagggggagtggagcccagatctgtcacacatacggcgtgggggaccccacctaccactggtcctcagcacctggagacccgagccttcagcaatctgggaagcatgaaagtgggtttcggtgcacagggccacgcctccgccgccagcagcccagcgggagcgtctgaccagtctcgccctccgagaggagagagaggcggcccaggacggtctgcttagaggctctctcccctgcagagctgggcccaggcataggtcagacgcctccaatacagtccccagggcagcgattaaagcggagcaggaactgcagacccgaccgggcaggacaggtgcagcttctcggagttgggggcgggaagtctcgggctgaggcccacgtgcttcgccttcgccccgcctctaccctcattggttgaagccagattgagaggaggtgccagaaaaaaaactcctccctccaacctcattggccagctcagttctgaggcagctctctggccccgtctatgggctcgcactacactccaattgggtggttgttctcccagacggaaactccgccccacctgtaccttggaccgctccgccctaggggcggttccagcgcgcttcgctaatcggttctatgctcccattggtctgctttaatgtgaagggcgggtcctagctgattcgctagccccgccttgcgttcctattggctgctcctgctctgcggttccgatcccgcccagcaccgtcccccaccccccgccgcccattggctgcgagaggccggtgcgggccgcactcgcagggcccgtggcggttcaggcgccagagctggccgatcggcgttggccgccgacatgacgcccgaggacccagaggaaacccag

SEQ ID NO: 13653 - DNA, 1021 bp, Homo sapiens
tgcctttctttcaatttcaccatgtctttgcctcggtgcatctgtcaacatcttcactttctgtcccagttcctcccagcccctgggcttccaatattctctccctccctcacctttgacctagagatactgtccccatctctctgtctctgtcttgccatgtgactggttcattcactgggcagatgtttatctcatgccgcttccattctggtttgagcctgagataaataagtctgaattaatgagcctctccttcgcggcttccattccagaagtgtctgtctccatctgtctccgtgtctgtcattttcagggttttcttgtatccttaccttgcacattctcaatcccactgttttggtctcttgtttatatctctgcttttctctgggtctctctgactctgtaactgtccgaaaaaaaagtatccttcactttccccactctccctctcctcccagctctcttattgcctcatccaacctctgtgggtctctgccttgctctgtgtctggatcggatctctgggcctttgttacgcgtgttagagtctctgtctttgcagctaaagacctcctccctcacgccccttttcttttgtgaattcaatggatgagacaggcccactctcccttaacaaagatggcgacaacggcgctgtctatggggccgcgacgtcgtctccgctgcgcgtcggccctcacccacgatggcggccagtctcccgaagcgcgaggccccgcccagctctcggcctctcccgcggccggtccctgcaccaagctcgcgagctgactggctccaccccccgcgccctcgtattggtgcggcccaggccggctgcacggccattggctgagcggatgcacaccctccccccacccctaggtctgatgggggctgttggtgctgacttgcgggaccgcctggaggaggacccggcgtgtgaggagggtgcgggggtcggggcagggaccggagtctaggggactgagggaccaagaggaacagagactca

SEQ ID NO: 13654 - DNA, 1019 bp, Homo sapiens
gtttagggttcagatctggggaccagcgccagcagaccgcagtcctgcagcggcgccccttgaggacggcatgcggagcctcaggggcagaagtccgcccggctgaccatcctttattaaaatacgacagttcctgaaaacaatgcttatctcaagctgactcaaaactggctcttgagaaaatccggtgttaattaaagagggttgtcggggacaaaattcacggcttgtgtttcgcgggggagtggttgtggggtgatcttaatataaacacgttatctcgagagttaattatgtctctggttggaaacaggagaagagggtgactgtttacgcagtccatgggaatcagcgtctcactttaggggacggtgggcaagggtcgcccttcgatagcgcggcggctggtccaccagagaaaccaagttttctaggtcgccggggaaaagcggaaaattagacttgagccagccttgctcctgtgagacattcgtgcactcataacccagcagtgggtgcctctacctagaatgagcccttcatttcccggatccgttcagggggaaacagcgaaatccccaaatccgcttccttacgtggctaataaaggggtgcttacagagcatggaaaaacaaaacaaagaaacaagaataccttgagtgttttgacgtttgaaaacccgactccggagaatcatggaatcatattccaagtttcagtgtctaatgaagtttaaggggacgcctattacttgggtttgtaaaatcgcggcgtcgcgcccgccccaagtcaaagctgagcagagcagggatggggaaggtctccggccccaggcgcggcgcgcggggcttctgcccagtttcctgcttctcagccgcggtgtctgccccggcccagagcagtctgtgcaatttagaaactcgataggaggcagcagctggtctcccaccaccctaaaaataatccgttccggcgcactgcgtgcttcgcctaggggaggaaaactgtcatcggagta

SEQ ID NO: 13655 - DNA, 1018 bp, Homo sapiens
gtaaatgacatggtttccccaaattaatcatttgccagatcttgcatctgttattttgtaaaatcttaatttttgtacaaaaataaaattaaaggaaaaaattaaacaagaccatagtgtgcagctcagtatattacaagctgtttgtttttattcactcaactcaataatgtacgtagctagcattttaactgtggaatatgttagttttcatatgatttgatcaatatcccattttcttgacctaagtgaataaaaataaacagcttgcaacatatacagtttcagattttggttttgttttggtggttagagaagctggcataaaaatatagcctgaaatgactataaattccacaaccaatttgatcatttaacttaatctgtgtagtaattttatttattttttaaattggcaacacatctcatggatggaaaatcagaagatacaaaagcatgtttggtaaaagactcttttttacctctatacccggttccccatttccacatgcctcaggcaatgttaatgttgattcatctaaactgttgaactaagatatatttcagctaaaacctgattttattttgatgctttatcaaatgacttaaaggaacagggtatgagtatgagtccttgacaaacctacatgaatatccagggaggtgtcttaaatgaaacgcacttaggatgacaaaatacacatccaaaagtagaattccatttttattgtaaagaagagtgctgaaagcgagatctcactatgaaaccataaatcaccccatatactcttttggacttctctgtttctgggtttccagaacagactgttctcttctgactgttgcatatgtattgaagcctggcactatgaatctcttatgatgtaagattgaatttcccattgccattttttcagataacagcccgccgtcagtggaaacatatttatgatgaattaggcggtaatcctgggagcaccagcgctgccacttgtacccgcagacattatgaaaggta

SEQ ID NO: 13656 - DNA, 1018 bp, Homo sapiens
ttttggggagtagagaaagggagggggtgaatgaagcattcattatctgaaggcatggaatggggaacccctccccccaaaagaaatagatttcctcctcaggaaagttctagaataaggaccggaaaggggggaggcagaaatccacaggggagagggggaaaaatcacttggggagacttgagttaaaagtagaaaatgaggattccaaaggattcctaggaaaaatgttgccctcttgtctcaagttctatctttgatccaggacgagggaagcctgtctgccagtctgcgaggctgatgctttttccccctcctcttccacctctgttttttcccaacttgctttaggattagcctccatctctctcgaccccaaacagtggaatttggctgtgccttgggtcgtcttgctttgcaatatcgcctatagttgttggcggttttctgctgaggctgagccgtttgctccagcctccgactaaactcattaagttgggagatttttttcaattggacgggtgtttttaaagtctcgtctttccagccccaaacaaggtgtaacaacgcactcttccttctaaggaatgagatgagagacaaggatcactccagacatctcctacctacggtttggggttttttttcttaaaggcgaggcttgcattcctcagcagctatgtacaaagctccctgaaaccttgtctctctaaagttagtgtgcagggttttccaaggctgagagagcctaatacatggggaagcacttccttgaggtggaagatctctcccttcacctttcctctttttccctgcaggctagtgcctactttttatcagtttgcacaatcgcttagataaacaccgaggaggagattctctttaattatcaaagacacatcttttcagggggccaacaaagcatttatttcacccgccaaactaaaggagagttattccagtttaggaggaagatgcaagcggtttgggaccttgaacaaggcaaatatggttttgg

SEQ ID NO: 13657 - DNA, 1012 bp, Homo sapiens
ctctcctcacctttccaactcaagatttctaggccattctaatcacatccaaagttaaaccaccccctgcacagggagaggtggaattcagttatgaaaaatctagtctgactaaacctcactttgggtgatgtgggggcagtcagcctaaaacaaaagcagatcctttcccttgtcctccagggcagagggtgtgattttctccccttctctgctcacccttctctctactccccctgtgcacgtgtgcgtacacacacaggcatacagatttctctcagctctacatcctctatctagaggtcgagatttggtttcaaacattcttcccaaataattctgtttacacaaccagttatcagactttcaaaaattttccttaaaaaatcaaaaagaaaaaagtcattgtattttcgtgtttgggatatgcattgctcctctgaaggctggacagattctaggagattccctttgcttatattttaatattatcttcattaattttctctagtggaagcaagtctggcaattcaatcacatctgcaagagagacatataattgactaactgtcatttcaaatgcagttgtattgtttctcatgcagtatttgttctaaagcctttcaaatctttttttttaagttttagagtatcttttttatgttttattttattgggataagaagacaacataagatctaccatcttagcaaatttttaagtgtacaatacagtcttgttgactataggtgcaatgctgtagagcagatctgagagaaaggcagagcatcttattacctctttatggttagattgagctttggaaagaacagaatgtgccactcagagttcccctttccagtagagattcacccctctccatttcatgcagttctcttgggacggtcagtcgtggagctttacctgggcactggcacctgggatgggaatgtgaccaaggattggacaacctgagtatttcatgccctggtagcatgattggttcatgaca

SEQ ID NO: 13658 - DNA, 1010 bp, Homo sapiens
tcacttaaaggattttcccggtttcctcaagatggggagaaacctgtccctgaagccgccagtcagataagactgtgctcgccccttaagcctcctccaagcacgccctatttccggtcctcgcagtcggaatctgaatccctcctttctccttgctgcctagtacttggctcttatcctcacaaaggcacattttatcttgttttttgttgattgttcgtgagtgaagttctcccactacgttttaaattccttgaagatagagatggcgtcctgttattctctttgcttcctcttctggacctggcatggcctctggcacacaatagctgcgggcagtgcttgcctggtttgccttacgctatcctttccttcattttgaactttcagaaggccagaggtcaacgaacgcagatctagactcagctttggctaatgctggtgttggcagacccgggccagcctccggcatccaggactcacaatctgggtgaggggggacaaattgctagcctcagtgaaccacggttgtcttcttttaaaagttaaaatcagatcaaccacccatctttcacgattatttgaggattaaatgagataagaaatgtaatctcctttgagatagtagatgcttcatgaatggtacctatagtattttattaaaagctgggcatggtatttgtagggatctttgaagcataaaattaactttgttttcttctcctgaaattaactttactgagcattcagtgccaagtggtttgttttcagagaacaaaggctgtcctccagaggggagtgcatactctgggggtggggggggggtggggggcggcgctagtccttcctgccttccccctccctcatactttgggtggaggcaggaacagtcctctgtccctatcttttggtgtccggacatggccttggcactgtagcatgtggacagccagtgccatggatttcagaacctgcattgccagttgactgcctgctttgtgtgagtactg

SEQ ID NO: 13659 - DNA, 1009 bp, Homo sapiens
gaccaacaagaaagcctgtgagtaggggataattttgatgtttaacaatgatttgggacaaacttaagatgagataaatttaggttgcatagcacagtagctactctaaagaacacagtgacccaaacattgaccaataataaaatctgattttcaaagaacaaaaacagaaaaaaaaaagaaaagaagttcctccacgagaggtacaatgaattgtcaattatcatcttggagtgaagagaaatggtcatccggccgggcgcggtggctcacacctgtaatcccagcagtttgggaggctgaggcgggtggatcacctgaggtcaagagttcaagaccagctggtcaacatggcaaaaccccgtctctactaaaaatacaaaaattagctgggcatggtagtgcgcacctgtaatcccagctacttgggagattgaggcaggagaatcacttgagcccaggaggcagaggcggcagtgagccaagatcacaccaccacactccagcctgggctacagagtgagactctgtctcaaaaaagaaaagaaaagaaaagaaaaggtcatccaacaatcttggcaatagaagtgattacctttgactcataaactcattcacaagtgcatacacacaaatacaaactcactcccatttttaacacacaaaagaagtaattatgtgttcaaatatccccacagtatttgaggctatcttgtagaataccacattccttgtggtaccacacattcgtgtggtatctttcttgataatcaattgcaaatgaaggagtaagagaaaaaaaaataaatgaagtctacacaatggcaatgagccagtgccaacaatcagctcatgtacaatcaaaaggattccatctggggcaggaaaagagactaggtaacccatgagatctttttcagtactggaatcctatgtgcctattccaaggagaagcctgaactgttgtttctttctcatacagatattttgagaaaactccagccttgtc

SEQ ID NO: 13660 - DNA, 1004 bp, Homo sapiens
taggtgggtgacaacagaggattgaggatttttaaaaagataacactgtcctagatccaacaccactgtgggcaaatgctgggggtctgtgaaacagttggtaccctgctgctgtctgatattggaaactatgagatctataaggtgatcctggtgacctttggcccactgtttttacgcaagcaatggatctacagccctgctttgatgatggagataagcaattttgcaactacattacaaggatcagaagattgaatgttcagggttagtctcttgtggacaggtaaagatggaagaaggagaaacccaggaaacatggcaagcctgcttctgggggttagaagctgagaagttgagtgtagggggaggggcagtgtactaatagctgtcacacaaccttctctggaagtgctttcctggctgtatgaaatcgatggaataacgtgcttagcatccgttcatgaaaccaaatgatgtgatacgataaataggatgtgatatgataaatgataaatagtacagtggaaaagcatcctactggaagaccatatcttactctgtgacatcttccaaggcagttcttggagttggcccagggagatcagagatgctatcttatggatccagactattatgtgtgaatagggaaacctcagtcctgccatgaacaagagtaagcaccacagacagcagaaaagggcaacttttggacagaaggccatgtttctcaaactttgtcttccagaacaaatctctaatccattcaggtgggttaatatctaacccaatcatgcccagcgaaaaggtgaatgaccctcctcgtttgttcaagagcagtgtccttggttttcatgtccctgccaggactgggacactatatattaggaacactatataatcagaacctggagaggcctccaggttcacacaactggaacccatctccaggaacaaacagctggaacccatctcccgttgaagggaaactgccagatttttgt

SEQ ID NO: 13661 - DNA, 986 bp, Homo sapiens
gaatgttgtaatctgcaaagcccttctgattctgggagtgaggccagcattaatacaacgcacgattgttacttctgaatgtccctttgcaaagaacagtgtttctcaaacttttttctgaccagatctgcatacattttacatcgccgctggcgatacatacgtgcaaaacactgaaatcgaaatttctctaaacaactcctttactacgtgatgtactgtgaaacttttctattttgttctattctcaattttattaaaaacggagggtgatgatcccgatctaccaaaccaatttcacaatgcgctagagattataacccgcggtttggaaaatactggcttggaaaaagctctttgatctgtgtcattctcctcacatctccctacacctctgcggagttccgattgtttggtttcgtcctgataatcactgtgctgtgttttccctacacgctctgtgacggggccgtccgcctccttcctgggctcctttaagagggtggtaacggtacatcaccgcgggagtggagaggcagggcccactaggtcgtcgctgcaggccaggcccgctcatccagttattgtgaaagccggggtgtgcgcgcgaagagtgggagggtaggggtgaggcaggggcagcactgacgcctcgcagggctgagtagcaacagctcctccgcgccgcgtttccggagaccctgaaggagtccgcgcgtgcgcagagcgcgtcccgggaactgttccgcccacggaggctgccgagcgcgctcccgccgggccaaagtacaaagtgggctccagagcgcgggcggcgcggcggcgcgagccagggggcggtcctgcgcggccggccccgccctctgctctcctcccagtctcccccgcgctgcgtgcagtaaggtagccgccgccgccgccgccgccgcgtcccctcgccggctcgctggtaccggcagtgccatggcggccttcagcaagtactt

SEQ ID NO: 13662 - DNA, 973 bp, Homo sapiens
aagtcagcatccattcctctctgtggttctccctccgccccatccaggtctcaagggtctagagtctttcaaagagaacacattctgagatttgaggaggcagagacaaaaagttccactgcgaagtgccagggaggcttctgtttggggtgtcccttgggatcacagatcccccacctggtgatgagtcaacccagcaccaccccattgcagggctggaatgacagtaatgggcccacctgctgcctctcctcatacccgcaccccagtcagacattgcaagtcagtcacggctctgtcctgctgggcctggagtgttccagtgccttttccatcacagcaccaagcagccactactagtcgatcaatttcagcacaagagataaacatcattaccctctgctaagctcagagataacccaactagctgaccataatgacttcagtcattacggagcaagataaaagactaaaagagggagggatcacttcagatctgccgagtgagtcgattggacttaaagggccagtcaaaccctgactgccggctcatggcaggctcttgccgaggacaaatgcccagcctatatttatgcaaagagattttgttccaaacttaaggtcaaagatacctaaagacatccccctcaggaacccctctcatggaggagagtgcctgagggtcttggtttcccattgcatcccccacctcaatttccctggtgcccagccacttgtgtctttagggttctctttctctccataaaagggagccaacacagtgtcggcctcctctccccaactaagggcttatgtgtaattaaaagggattatgctttgaaggggaaaagtagcctttaatcaccaggagaaggacacagcgtccggagccagaggcgctcttaacggcgtttatgtcctttgctgtctgaggggcctcagctctgaccaatctggtcttcgtgtggtcatt

SEQ ID NO: 13663 - DNA, 973 bp, Homo sapiens
cccctaaaactgaagaagccaatttgtcctgcggctgtttaccgttgttttgaaaagctatgcgttgtatctatatgtaaagagacagtcgcaggtatagaaaggtttacacatataatttacttaggcattctttcaaattgtattgtcactatctcctcttctgtagttgtgtaaaactgcattccacctcagagatgacgatcccagttcacatgctcaaacaatttagaagaatgcctttattattattatttttaatgcccagcatacatcaggaaaacaggaaaagacatgattaggaatacatgagaaagtacagcaccaaataagccgcggcccccggtgtaataaaaacacagacaacggcaggacaaacttaattctctaccttccgcagaatcctttcccaaattaactgagagtctgcgtgagttctccttttcaaggcaaaagagatcttaggttagaaatcaaaggcaaatccctccagtgcttagagagttaagttagttatgtttcttttgtagcttcccagaagaaaaaaaaaagaaagagagagaagggaggaaaaaaaatcaaacccgagagtgtgtattgggagcgtttcaatcgctcccttctccgctccctttttctctgcccactctcagtttccagcccccttcggctctctgcaccctgcctacctgcctggctcctctcgctccgtgcagcctcccgtcgcctccctcctgattgggcagaggccccccaatcggctgcgcggctgggccggtgggactgcatatgtaaagccctacttcatattaataagctccaatcggggctttaagtccttgattaggagagtgtgagagctttggtcccaactggctgtgcctataggcttgtcactaggagaacatttgtgttaattgcactgtgctctgtcaaggaaactttgatttatagctggggtgcacaaataatg

SEQ ID NO: 13664 - DNA, 973 bp, Homo sapiens
aggaacacacaaagaggtacccaaatatatacacaagctgtcattctccagtgcacacagaggtccaggtgtatcagacactcacagagacctactgctcacagtcacatacacatacagatgtacacatacagatgtacacactcaagcagggacacacaccgtcccctcccccccacctactggggtctcttgaggggaatctgcacccatattcctctcctctccctctctccccaggggtaagacagatcccgcccaggagagaccataaccaggtaaaggggcctctggtggcaatgcaggggaggggcagaggtcaggagtagcaaccctgccaggcaggttccggaagctcaacggggtcccagcgcatacccggtgcagccccaactcaatgccacctcagtactcaccgctgctcgcccagagctgagaccgaggagagacagaggagaggctgggcccagctgagctgtgaaggcagcgcggctcccgtttgctccaggcccgcccgcctctcagtccctccccctaccccctacgcgccgctcaggcaacgctaatcccccccaccccccgccctctcccagggcccagagccccggaggctgccagccccccttgtcgctaggtccccgctgggctctcccgccaacctaagacccgccccagacaaggaggagggcgcatggaacccctggttctattccccagaccctcacgtgccccaccccacttgtgtccacgtctctctcgcccaccgccccttgagccacacgtaaggcccggctgcacacgcgtgtcccgctccagaccccacgcgtgtccctaggaggctgccacatgacctgttacatgccacacgcgctcccgcccccacgagcacgcggccgcgccaagcacacggtatgggtgtagactggacccgccccctaaatccaggagaccatcaactatggaaaggagatct

SEQ ID NO: 13665 - DNA, 962 bp, Homo sapiens
gcagccctgagttaacaaaaagagataatcctattcgcttatttgataatccagctgaacctgaagtactgatttcagcctgttcatcacctgaatgggctgccgtggttagagggtttccaacacagctactggaacacttttaaaaggtaatgctgtgatccatgcagccaggaaggggttggtccctcataactctgcaatcctctgggcccagttttctttttcctctcccggttgatgacactaggcccattggtggtacggctttgggtttccttcagtctcaagatctcagtcagggtgggtgaagtggaagaacaagccttcttgcagaccactggttggttggcagcctttgccatagctaatctggttgttttcaggtcagtgacagtcacttttaggagagggttcgtttgctttcaaaatccatctccccgttcctctcagggttctttgccccaaaggactttgcccttccttacgcagtggacaccttggcaccctctgcaaacagacagtcccgcagaggccctcgacgagtgtcactccatctgtttcgcgctcctaggagaggtgtagcagaaagcagtgccccaggcctccacgcgacggtgaagcaggaaccaggggctgccagcagagcagcccaggtgcgtcgccttagggacagagctgccaagtgccgagctggggctgccagagccgagccgggaacggcatttgccagagccgaggcggaagccggagcatttgggggacgggaccgcgggaacccggaaacgcctgggctgcaccgagctggcggtggctacggcgacgggagccggcggcgctgcgggtcagcggtcgcgtaggacccagcggactcggcagcctggggcgcccggcggagctgaaccgcggcccccggtggtgggctcagccggtcgagctgcgcgggaggtgagtcctcagcg

SEQ ID NO: 13666 - DNA, 956 bp, Homo sapiens
tctccctaaatcaggggtaaaggtggcgcaattctaggtcaaaggtcatgagatctgattttaccagcttctcctctctcagctccatatttcttcctcttttctcatccaagagcagggacctcacccagccccattcctggccttttggaagaacaggggttgggggggcggtgtatcctagtgactgattagggcagaactcctggacccctgggatttattttgctgtctctattggacaccctccccatctcagcctcagcctcccaccggcagccccagagccatgttggagggagaggcttttctgtttggtttgaggcagcctgggccccacactggggagaaaggagttaaagccaggtcccaggatcaccgggaccgggaagttccggtggtccaaacaggagtgggttggggggacccgcaggaagagaggtttgggacaaaaggggggtggtgccagccatgccaatccccatcagcgctcggcatccactggtagaccgcccccccacccctcccccaagttccacgcctagtttctgccttcccgccccagcgggccgcctgcaccccacggccagtcagaggcccacctgcggccacctagagccgagaggggcttgcctccctgctgccgcacgcccattgtgtgcgccgagccggcggaggggctgcgaggggcggggccgggcgggcggagggagggagcgagggaggggcgcggggagatgctgagcctacgggggaggcggcggcggcagtggagagagcgggaggagcgagggaaggcaggaaggaggcagccgaaggccgagctgggtggctggaccgggtgctggctgcgccgcgctgctttcggctcccacggcctctcccatgcgctgagggagcccggctgggccgggccggcggcgggaggggaggctcctctccatggtccagaagac

SEQ ID NO: 13667 - DNA, 954 bp, Homo sapiens
agagggtacacaaaacacagggatgtggcccctgcggcaccacccgatgccagattccctgcaaagtagagccaaaactgggttctcttgtccacaccacccaggaagatctgcttgtatttatctttgaaggcgaagttaagagcctgggtggggaagtatctgatgacattggccaggttaccgcgccagaaggacagaactccctgctccttgggaatacggaccacgcagtctataatgcctttgtattgcttatctgcagtgatctgcttgctggcatgctgcacctaacagacaggaaggaagccaacagggacagttataaccatggggaagggaaagagaagagcttatgccatctcgatcaatgccctttaaggtaggctcccctctctcaaatctagtcttcgtatatcatactggctggaccctcccaaccctctgaggctgtcacaggggaagaggtgatctgcaccagtagcattaagcctccacccctctgagtggagagggggcatcctccagcggacccgtgaccttcagacctaggagaaaggtcattacctcaaacccaggttcagaggcattagggcgagtcccacatagggcgcggtcaccttggggaccgcagcctacgcctcaagtctcctgagctgcttccgtctcgctccgcccccactccgctcccagaggtgacccgagcgccgccgccgccagccctacacgctagcccaggagcgccctctagagccggcactggagagcgcgcggcgcagggaggcaggcggagacgcggcggcagcggccgcggctgcgcgggggcggacgtaaaaggcacacgcgcttcccggcgccggcttccggcccggcgaggtttgagcgcgtccgcgggctgggaggccgctggacccgggcgcatggcctcccccgggcagttatctccttgccgcg

SEQ ID NO: 13668 - DNA, 947 bp, Homo sapiens
gagctcaggcgatccgcccgcctcagcctcccaaagtgctgggattacaggcgtgagccaccgcgcccggccaacgccctgctaattttatcattttcttgtaaagacggggtctggctgtgtggcccaggctagtctccaattcctggcttcagttgattcccctgcctcagcctcttaaagtgctgggattacaggtgtgagccaacgagttcggtctcactctattttaaaaaaaccttttaatcaatatataacagacatatagaaaaggacacaaataagcgtagagcttagtgaatgttcacaaagcaacaacacctgagatgaaccagcatccacatcaacaagcagaacgtcgctagcatctctggagtgatgctcatttagccctatgaaacctcatgaagccgaccgttttatcacccccatattacgcatgaggaaacaagcgtggagaggtcggtctcaagcaaagccctgttgaaaccggcatttgaatcagatccgctgactgactccaaagccaatgctctcaaaaagcaggtttgggggttagacggtgagttcagctttgaacgatgttgagtgggcgtctcgttttacagaaacttacttcccgacgtcacagccacagaaaccacaggtaaccagacgcctgcacgtcaggccaccgacgccttggtctacacagcgcagcctccagtgagcccgcggcatgccgcgcggcctccccacacacgatggcgatgtcgcaaccacagtagaaagagtggcgctctctactgtcccggaattcttgaggccggaagaataacagggcaaaggtcacgtagacggcgcgccccgcccccgtacgcctaagttctcgcgcgactcccacttccgcccttttggctctctgaccagcaccatggcggttggcaagaacaagcgccttacgaaag

SEQ ID NO: 13669 - DNA, 946 bp, Homo sapiens
actggtgcactggaagagagttcagtgaaagctacatctgtcctcagcccaaacgataagccacggtgcctgagccatgccctcatccagcatgacagtgagctttctagccgaagtctgtggtcccaagtcaacgatgagggactcatagcagaaagatctgaggccttgcacatacgcacgttttaaaaacaatgaaacaatgaataaaagttctgtagtgacggccagtagtgacagtccatgaggggacatcctggtactttcccctgtttcatacttttcctgttactataaccatagtctctaccttctctagaaagatgactaaaacatgtttaggacacctgggcagctgtactgagataccagcatgtggcaatccagccattatgggagctgcactactaaagcacaggtgcgtcctgcccattcttaagcccaattaggaggcaggggtctttgatggtggaacagagtggaccctgctgtgcatgatgtacccaggctgtgtcaactgcatttgtggcttgtcccatgaccctttggcccatgctgctgtgagggtggctgttggtcagggttgagaggccagagaggagtgggcaggcagcttcaggccccacgttggtgttggcctgggcacctgttggatcaacacaataactgtaccctggagttcctggaagctgccttctgctcagccaggcctgcttgtgggcggagcccatgccagctacatgtgtcaaggaagccacagcttggctagtgagcaatgcaattctgggaatgttcaggctctctctgttctttcctctcttgcaaaccatgggcacccttgggtcccttggggtcactatgttacacctgctttttatctgtctgggcaagagctgctcaagccacaccttgtgacactgaggtaagagcagaacgttgcagagtg

SEQ ID NO: 13670 - DNA, 945 bp, Homo sapiens
agagcagaaggagactccactcagggtcccctggctctgccttccactgtctcgacctcgtctgctctcagcttccctcagcgttacccttcacaggccccctctgtcctcctatgctgagcccagcatccaggttgctttcccagctggtctcgttatctccagaatctgaccctgggtaatccccagtggtgctgcattctttgttcctgctcctgtcagtcaggtctcagcctaggtcctgggctgctgggaggcaggacttgaattcctgccaggctggcagtggagggcaacaggcttctgtctctgaatctcctaaatctgcactgagaaatggtgcacagcattctcctggcccacatttggaggggaacttgggggatgttttgggagaaggcttggcctcacccagctcacctggcatctgaacacttcattcctttacctaccttcccctggtcttggaaaggcagggtggctgcacattttggggctcagatcaccattggctgccctccaacttaccctctgccttacatgagaggtaccaaggactgagtggccatgctcggtcaccctgaattggttcttctacagttatggtccccaccagtccccgggttttggttggctgccctggcacaaaggaggcatccaggctgtgaggattggctagtccagccccgcccagcctcctgaagtgtttcctagatctggggccaggagcaaaaacctcctggcaaaggaggagaggaggttgtgcgggacaaccttctcctgacagaaggtgccaggctgggggtggcagggctggatagggaggggcactgcccaagactgggatggctccagggagctggccctggtgatgggtgcttgcaggtaaccagaggtcaagttggctggtggttctagatgaggctgtctggtttctggtctcta

SEQ ID NO: 13671 - DNA, 942 bp, Homo sapiens
tattgctggtggcatcctattctgcctgttctctctttcttcctccttccccattcctttcattctcttctcccttattcttcctctgcaattctttttttccacactaccgttggccggtccctagggatactgtttaatctggcccatggtacaagagattttagatcttcattgaagtcactagagatggcctgagtgagtcactttgaattcaatagacaaactgatggaaggctctgagaagacctcaacgatgcccaagaaatgtgttcttactgtagaaacttactattttgatcaaaaaagtcattttggtcaaaaaggggagttgggagattgcctttttgttttgaaattgatttggcttcaagggaagaagattgcctaaacaaaacctgctgatgaagtcacaaaatgactccacctctggaatgagctttattttcttataatttggcaagaaatttggctttcaattgggaatgcacgtcactctacccactcaagggcaagatgataaggttctatcagaccaagcgtctaaaggaacctgagactctaccaaggtcagaaatgctgcaattcaagccaaaagatctttcttgggcttccttgttttgacttgtaaccataaattagtcttgcctaaatgtctgatcacattataaaacagtaagtgaatctgtactgtacagcaccctctgaagcaacaggagctatagatgaaccttttaggggattctgtaatttttctgtccctttgatttccacaggactctaaattgccccctctgaggtcaaggaacacaagatggttttggaaatgctgaacccgatacattataacatcaccagcatcgtgcctgaagccatgcctgctgccaccatgccagtcctgctcctcactggcctttttctcttggtgtggaattatgaggg

SEQ ID NO: 13672 - DNA, 933 bp, Homo sapiens
cagaggcttgtacttgtttgccttttaggtaggagcagttacttccactcccctcacctgccataaagcatctttataaacaaagcaagtagaagaaacacatcctggtatccaccacattcggcttttgttgattctgttcacttgggagcacctgctgctagggaataagaaggttgaggctgaagagtgaggactcttcagctcccctctggcaggacccgggagaggaaagagccctcagctggtccatcctccccactcctggtcagccttctgttctgagatcaaagtggtggggtcacattctcgagaactgtgctcagccccctcatctcacaccctttccctctccctgtgtgcctgcccccctcttacataaccatgctggtgattggcaccgtcataaatcaatactttgctcactttcacatcaagtaacactatccagggaggtggtttcaacaaaggaggaagtataaggagatctaggttcaaattaatgttgcccctagtggtaaaggacagagaccctcagactgatgaaatgcactcagaattacttagacaaagcggatatttgccactctcttccccttttcctgtgtttttgtagtgaagagacctgaaagaaaaaagtagggagaacataatgagaacaaatacggtaatctcttcatttgctagttcaagtgctggacttgggacttaggaggggcaatggagccgcttagtgcctacatctgacttggactgaaatataggtgagagacaagattgtctcatatccggggaaatcataacctatgactaggacgggaagaggaagcactgcctttacttcagtgggaatctcggcctcagcctgcaagccaagtgttcacagtgagaaaagcaagagaataagctaatactcctgtcctgaacaaggca

SEQ ID NO: 13673 - DNA, 929 bp, Homo sapiens
gcagaattgtccttgactgttgaacaatttaaatcctccattatggatgtgaagaattttaagactcttagtttttatcaaataaccaaatggaaataggaagtagccagtagattatctctacagctaaacaaaacaaacaaagcagaaacctgcaaaagacaaagcattcttgaaaaatgaagtaaggtcctagagaagctatttccaccatccaacaccagctgaattcccaaatggttaaactttcactataagtgctaccccactccaagtaaaaactacctaacacatgggagtagtaaacatgaaacattgctctcatttatttaatagtcgtcaccttgtaaataaatatgagtacatcagatctccagttatggggctggaagatttttagcataaggacaagtaggatgcagaggaaaaagggagaatggctagaggcatagcaaataattattttctgtaacacggaagacttttatcctatttatttacaagggaaaccctcgattacaacttgtctattaggttctgagaccttttgtgaaatcagacccccaaaaaagccggggggatctgtgaaaaacagatccaagtgtatttgatatttggcattctccggtgtccctcccacttgtcactttcttttctgatccgtttcagattcattccatatccttttcatattcattttatgttgatcctcttgtccctcctccctcattttcgtggttccttctccctcctcgtctcattaaaactcttgcaaatctccctttctgcttgctcttctgtttgcggtagctgctgaaatcttaccgaagtgatgtatattctgaaacttctgcgggtttctaagtgacattgagcatgctcagtagctagggccggttttgttcgcttggaaatctccctttctgctt

SEQ ID NO: 13674 - DNA, 923 bp, Homo sapiens
gagctcatcaccattgccagccaatctgggcttcagggttttaccctttcagccttctcagaaagcagctgtctgccttccccatcgcagccttgcaatttattgccattaccattaggtagcagtgacattccagagcttttcctgaaagggactcctgaatataagctctggcagagcgagggggtgggggagggagggggaccttgcagagagatggggaggagggggtgagaggtgtatgggctctgccctgctgggtgtatctgctgcaggacacagagttccatcaaatggaccacacagtgtccccatcttaggaggtgaaacctcttggtcaaaataactacccttagcaaattgaactgttcacccacatcagcaaatagtcttagagtagccatttggaaaaagagacatttttgtcacataagaaatatattttcctaattcttccctgcattttccccagttcaattctgttctaacctcagacacagaataacattagggtcaggttggtgtcccaaagtgcctgactcctccctggaattctcccacctgtccaccagggaagactgagaatcctccttttacttgggagccctgtgatggacacctccccgggcttgggctctgcaggcccacacagaggacagagagatgtgccgaggtgcctgcgttatgggccctcttagttggactttcctctgctgctgcaggccctcagccccggcagtggcagcatggtgctccagatctcctcccagcagctagctgctccaccccaccacccttcttgtctgtgactccttggagaggatccaggagccatgcagcaagaagcctgcagacctgtcacctcccacactggagaggctcccgtgaagcccggcctcagcagtcatttcccataccatgat

SEQ ID NO: 13675 - DNA, 918 bp, Homo sapiens
ttgacacaacagaaggaactccatcctttcgggggcttacgaaaataataagtttaaaaaaaataggaagggaattccctcgctccatgatcactgagcgctctcctaaggaaaaggaaatctcccggggggtgccgactacgggcggcgggcttaggatgctcccacgctccccgacccccaatccccaggacccgcaggacctccggaggaacgcccgccagcccgcccggagccacgcggcacaaggtgacacggaccgcgccgcgcgggcccctcagccgcctgggcgaggccgggagcagggagaggggcatccgccggcccgcggtaccttgtacttatcaaagccagccagctgctccgggctcacgtattcgtagccagccatgacgacccgaaaactgagcgcccactcggcagcgactcccggctacaaggctgtgacacacaagcaccacaccggctgggcaaggatggcaaagactgggctgcccgagaaggtaggagagccgcgctccgcccaccgcgcacgcgtagccgcctcggccccttcggccgcctctcagtgcgcaagcgcagcccacgcttctccccgcccatcgagggggggttgctagcccgctcgagcggcccgtcccccgacactgctgttgtccaatcggcgtggatcaggcaacactaagtcccgccttccagctctcttcgtcgcttcatttgctagcgtcaaaattggtgagctgaggtaaggcaagagagggggtgaaaggtcaatttcccagcgggctttgctcccggtcccgggggaaggtgggatttctgtggtatccgcacttgcgtggtgatctggggtataccgttttagtcttgggggtagagtgactgcttgcgaaccagttcagcagtgcctcaggtaag

SEQ ID NO: 13676 - DNA, 915 bp, Homo sapiens
agagtagaggaggaggaggagggagaaggaagagaaattatttattgggatccaatatgtgccaaagatagtattaggcatccttgcatgtattatttcatttgatccacatgactaccctgtgagatgttattcccattttacacataagaaaactggctaagagaagtcaagtaatttgtctgcggctgtgaattcaatttaaattcacagcttaaactcttttcactacatctgaatgcatcattttcaagatcttttctgggcctggagtaagttgacagtatttatgtaaaacatgtaatactgtatctgtatgtatgctcctcttccccacgctcattcacatttaccgtgattaatacacatgttaataaaaccctagacttagaactaggatatagaatccagtcgtttaggtacttaatgtttagttctctcctccagaaaacaggaataattaccgccttttttccactccaaagaattgatgtgataattagggagataagattagttactagtcataacaagaataaactacaactcccaaaatgcccagaggaagaggctgacgccagtccaggagacagttccagctttagggcaaaggtgaccccactgggtcccgtggcgaaagagagagccgccggtcctcgccttttttctgatgcatccagggatttgtagttcccttacggccaccaagtgcacttagggcaggcctcttactacgagtcccgtgatgacccgaggccgggcagcgcctgcgtattgaagccgagggagcgtgcgggcggtactactggcgggaggagtaaagatggcggcgcgagggtctccgccctctgctccgggctgaagcgctctgagagaggcggcagcggcaactcgagccccaacagtaatttagtg

SEQ ID NO: 13677 - DNA, 913 bp, Homo sapiens
tcaaggccagtaaacagtggaattagaagcacttagtaaatgtcatattttttcttttgacatctatcatgttttcagaatatgaaatgcctatttaactccagcctgggtgacaaagtgagatcttgcctaagaaaaaaaaaaaaaaaagccaggtttggtggttcatgcctgtgatcccaacactttgggaggctgaggtgggaggattgctggaggccaggagttcgagaccaccctggccaatataacaagaccccgtctctatttaaaatacacacacacacacacacacacacacacacacagagagagagagagagagagagaaatgcctatttagcacagtcttgacttcctattttacttttggtttaggaaagaataacatgaaaagtatagcatgctccaagtatacagcttctcggtcctctttagatttctggtgggcctttgcattgaaacctaactctttgttttggtttaattcgcttccttttcaaattatgtcatagtcctgcttggttgtttttttgtgtgtgctagaaggcagggcctgtgagaggagaccctcagttacatcagggttaaaaaagcacaggaagtttacgcacagagcaaagccatttgctagaattggtttttatccttccatttcgaaaataaagttgctgtttgtgttggagatgctgtcatcagaattccgcggcacaaagagaaagatacaaaaatatctctctgacatgtaactttcccccttcttctagccccttgctaggaatgccagaagaggatcccacgctgactggaaccattaggtcttttgtttgaatcccagtgatcgagaaagaaatgtggttcataatcagctagtagtggagaaaaaaggaacccaaggagataggagagctgt

SEQ ID NO: 13678 - DNA, 913 bp, Homo sapiens
ctcttgcaaacgcatttaaggactcgtcgagactgagagatcactgcttttatctggtcgggagacaccagcaatcttaatttggaacggtttgatagagcggagtgcgatgaggcggtccaaggttcctaagcaacatagacctgaggggcttgtctccaatgtcctttcacctgtctttcaagtccctctgctgaccgcacaaagactcccgtggccccggcagcagctcggccttctctacatctaaccacgtttactaaatttctacggcacgcagcgcaccgcaccaggagctgggagcggctcgcggtacagacctccttcctcttttacttcgctgcagcgggagaactaagtcctcttacctgaggcactgctgaactggttcgcaagcagtcactctacccccaagactaaaacggtataccccagatcaccacgcaagtgcggataccacagaaatcccaccttcccccgggaccgggagcaaagcccgctgggaaattgacctttcaccccctctcttgccttacctcagctcaccaattttgacgctagcaaatgaagcgacgaagagagctggaaggcgggacttagtgttgcctgatccacgccgattggacaacagcagtgtcgggggacgggccgctcgagcgggctagcaaccccccctcgatgggcggggagaagcgtgggctgcgcttgcgcactgagaggcggccgaaggggccgaggcggctacgcgtgcgcggtgggcggagcgcggctctcctaccttctcgggcagcccagtctttgccatccttgcccagccggtgtggtgcttgtgtgtcacagccttgtagccgggagtcgctgccgagtgggcgctcagttttcgggtcgtcatggctggctacgaatacgtgag

SEQ ID NO: 13679 - DNA, 912 bp, Homo sapiens
catctttcctcagaccatgcttcccagatcttgcacacattgttctctttgcctaaaatattcaggctattttcccttatcctcctttcccgttgccctttcttctcttttctggtcttctctaactcccactcaccctttgataaccctcttatagtggctttacagactcttcttcccagatgaatgttactctttcaaagaattatggaacactaaagaatattagtagcaatttcacatgcatttgtatgtgttcgattacccctctccaccaccaactccaggtgggtagatgtcacctagcttatatttaccacagtatccccagcagctagcacagaatgaatgaatacttaatagcttcacttacaaaagggaaatagggtaaccatctcattaggttgtaaagattaaataatacatacaaacactttagcacagtgcttgaatcacagtaaatgctgacaccgaggcattgtaggcattgtagtttgtggacaggagaggggactccgtctgtctcattttagcgcctcccagtcttcctccatcacctaggtctgagaaactcctcctcctacctacgagtaagcagcaattgctacgcctgcgctttcctggttccacccctaaccaggctgccggaagcactttcctctttggcacgggccagccgcaggttgggtagatactgcgcaagctccatactcgtgtctcctcctcccgcccaccggtgcccaacctgctaacacgcctgcgcgagcgggcgtgccccggaagccgttctttggccctgtgacacgtagcaacggggctggttcagggtctgaaacagagtttgggggttgtttgggattagtgaagctactgcctttgccgccagcgcagcctcagagtttggtgagtgac

SEQ ID NO: 13680 - DNA, 906 bp, Homo sapiens
aagcccctacaactccaattagcccctcaggaacacaaatgtttctcttttccttgctccacagccttttctggctctccagtgctctcaatgacccaaactgaacggctgtctgcagagaactgcatttcccatcgaccttttcgctcgatatttacattttaaaaaatgttttgtagcgatggagatctcgctgttgcccaggctggtctcgaactcctgggctcaagcgatcctcagccttccaaagtgctgagattacaggcgttaagccactgagcctggctaaattaaaaaaaaaaaaaattgtagggatggggcggggcgagggtcactatgttgctcaggctagtctcgaatccctgggctgaagcaatcctcccgcctcggcctcccaaagtgctggagttaggggcgtgagccccggcaaggggcagacactcattttctgtcgtggcagacaccgcctcctcctgggattggtcccggcctcgccctcctgccactcaggccttgactcgctttactgcatgagcccagtagcccagtctccgcctcttacgtaaggcaccgcccagtcgtccaggcctccgtgaaggggggggctggaggggtcgggggggtgggggcgaggccttccctcaatcctgacgtccattggctgtctcttcgccggcggggcgtgggtacgggagccgggcgggcacgctccgaaccgcggcttaggtggcggcggcgaaggatgcacccggcaggcttggcggcggcggctgcggggacgccccggctgcgtaagtggcgtacgtggccggcggaggagatcgggcgggcgggggcgtggcggggcggccgcgtcggttggcgaggtcactgcaggtcagaggtcacgagatcaaggatctggaa

SEQ ID NO: 13681 - DNA, 903 bp, Homo sapiens
cttactccaggcaagatgacagggaagatgtctgtgagccctggcctcagcacccccagcaacagccactagtcaaccagtttgctcctgggaccaaaggactgaggtgggctaggggaagggagaggctacttggatctgcaggtgaaggctgagcaaagagtaagggcaggagcatctattctagatctggcatactcctgcccggccaatccagcactgggagggagtgggtaccgccccattgcctaccctggggaggcgccagagactggcctcgcaagagtcacagcctggccacagacaactcaactagtccccccaaaaggcagaaaggagaaaagtgccagagagaaaaggttggcatcacggggccaggacactgacctcctctgccagccgtgcccggcctcccagaggatggagtcacggaagcctagcaaatgggaagggcagagacccaggcgtcccgggccgccccgcccagtccccctcccgcccacccatccctccgccccccagccccagggcacagaggagggagccgggcaggggcaggcaggggagggaggagcgagggcgggagggggaggagggagttgggcagggagggaggttggggggggggtggggagggagaaaaagaaagaaaatattttccgtgtccccgcctgcagagtcagtgtgcggtttgggagaaaatgtgtcggatattttggggcggtcacgtgggcgggcgggctccgagaggccccgggacagtcccagcctagagccgtgcccccccaggagccccccagtacggcgagccccggacattgcgacgctccatccaagagactgcccgacgccgggacctcggggctccgccgcctcccttccccctcccactccaggtgagtc

SEQ ID NO: 13682 - DNA, 903 bp, Homo sapiens
cttaagaatggaggggtccaaactagagctgtaaacctagtttggacagagagagacccctctgtaatcccagcactttgggaagccgaggcgggaggatctctcgggtccatgatttcgagaccagcctgagcaataaagtgagactctctctacaaaaaataaataagtaaataataagtaattagccgggcgtagtgctgcgcacctgtggtcccagctgcttgggaggctgaggtgagaggatcacctgagcctgggaggcggagggtgcagtgagcccagatcttcgagccactgcactctagcttgagcaacagagcaagaccctatttcaaacaaacaaacaaaaaatgagtgaccttgagcaaaaccctgcccctcttagaacctcagatttgccgtctttacacagaagatggacttcaaactccctacgaccttgcccggccccctcacgctgaattggctagcgggatggtttcccaagggctctgcgggagactgcagcatagcagcgccgcggctgccgaggggttaataccgttgggctcttccccttttcttgccccgccccacgggcaccacccccgccagggttgtacccttgaccccgccttcaggccttgcgtccaccggaagtacccgcgcgcgggcagctcacttccgcccggcaggtgacagccgcggggctccgagccgccggcagcccggacgcaccgggagagcgagaggtggaggccgcggacattttggtgccaagccgaaccgagccggggcgccgggagctattgggacctgcgggtgaggaagcggggacccgggcgagccaggagaagaagtggggcgaggggtcaggggtcctaggtgaggggtttgcggggtcagaggtcatgaagagga

SEQ ID NO: 13683 - DNA, 900 bp, Homo sapiens
gtgcactttacttaaaaagcagtccttacaggaaggaaaaaaagggcagcttctggagccacacccacctgttttgactctggaattgggtactttcttgctgtgaccttgagcaagtaaaataatctgtgccttacttccccactgtgaataataacagtgtctggctcatggagctgtgatggggattaagtgagttaatggatagacttctcagcacagagcacctaatacagccttcattccattcgtccttgttaccaggtttctgctaagctcccttccagggctgagatctcagaggcttcaccagctcactttcccccactttgctgcaataatcattggctagaggtattgtgatatgatgtcattaaagttaatctagacgaaaatttgatttacctaaaactattacactgtagacctggaggaatttcagtttttgccgtaattgttttcaatgtgtgttataaaaaataaattccactatgttcacgaatgtacaacttataatctgaccaaaagtgagagatgggtagattttcctacttgggtccttctgtggacaggtactaggtgctgctttacgcccagtgacttgtgagggaacagaactgccctttagtaaccctgctcacttcctgttttctgcagtaacaattacattaggcaatattattacacatggaattgcatcatgctgattttaaaacaatcctccctgtagcattacacagacactgaatcatcatttgtagtttggggggctttacatgcctgcagtggtgaaaactgaaattttgtcccacttaagggagtttcttcttccctttattaattgcaaaataaatatatgtcacttcagagggcagcagctggactacctatgtttgtggg

SEQ ID NO: 13684 - DNA, 900 bp, Homo sapiens
gagctccttaaaatggaaaataagaggccggacacgatggctcacgcctgtaatcccagcactttgggaggccaaggagggtggatcacttgaggtcaggagttcgagaccagcctggccaacatggcaaaaccccgtgtctactaaaaatataaaaattagccgagcgtggtagtgcacgcctgtaatcccagctactcaggaggtggaagcaggagaatcgcttgaactcgggaggcggaggttgtagtgagctgagatcatgccactgcactccagcctgggacaagagcgaaactccgtctcaaaaaaaaaaaaaaaaaaaaaaaaaaacagaaaatgagaaactttccccaaacagtattacacggtgacttgggcaaaactgactctccaccaagagacacttgactgtagttttcctggcagggagagcatctttgaggtctctagtggcccaatctgttgccctcagattacctggtgtcatgtagggtggaggacagctgttgtttgccatgcgttcctgacagaaataacccttccagtcattcaccatgagcctgactggtagagactttagcaatggggaaataccgtagactgttccatcaggacaatgctgggcctgcagtccccagggggcacccacttacttagccaaaccccagacgtttcatttaaaagcagaagtgaaaggaagaccaggttcctgaaagggttattctgacttaatctggctataaaaatgctattggctgttatttggcatggccaaagtgcacccagaatgtcttctctctccattcagtgcacgcgttactttggctaaaaggaggtgagcggcactctgcccttccagagcaagcatggagcaacaggatcagagcatgaaggaag

SEQ ID NO: 13685 - DNA, 849 bp, Homo sapiens
ggttgacactcagcatcattcagatcttcatttaattcagtaaacacttaactgagcacttcctgtgcctggtatgataatgggcattggagatacggaagtaaaaaagacaggcagattaccctgtgagcagctggaacaccgtggagccttctgggcttctctttatcctaacattcattgcagttactgttgactgatcatctctcagcaatacccaccattaaccatggaatagaagcctcctgaggctaggggccatgtcacccccaacacatagcacagttcctgatttggaattcactattacccgttgaataaatgagtgaatgaacgaatgaataaatgaaaagctgtatagtgaaggcacttctatgtagaacaatgtggtgtgtggtggggggtgtgatcttatgattacatgtatatagatttttgtccatggttcttgtccataactcccatgacacttgctgaggtcttttgctataatgtagaggtgctttaggcctcaggaaacagaatatttctctggccttctttgccctcctttcatccacccaaggcgggactctataatctgattgtgggtcataagaccctcattccagaggaggtcatgccccataccctggaggaaggaatgctgcacaaagagaggaagaagaatctggacagacagaccttgctgagattagatcataccctttttgtccaatcacattttgttcaatcacatgcttcagtcatggacaacaaatgaaatctccataaaaggcccaaaggacagggttcagggagtttctggagggctgaacacgtggaggcaaacaggaaggtgaagaagaa

SEQ ID NO: 13686 - DNA, 813 bp, Homo sapiens
taaggtcagtcattcatcctccccccaccacatcaggaccattttggtgcccccactcgttgcctcccctgctcaccaccaccctcacccaagccttcttgacagctccctgaccttcttccctttcagcctggagcagctgtgttctctgtcctacttctaaccaaaacctactctcaggagaagacttggtacctttctttatacttgagaggacattctgtccttttatcttctagttattctatcatcagtcctttccttattatgaattagcaaatacaaaatctttgttccccagggtaaagaaaagaattttaagaagtggtttttcttagccccctcagcaccctagtctatttctaacaccaaaaagacaaaacaagggagaggaaaggagaaggagatggaggaccagttgcaggagagaaaggagaaaaaaatccacagtgggggtggcggaagatctatgacttctaacaacccattctgtggttttcaaagagcgaatataataacagctatgaaagtgtgagcaatgacgaaactggagagatagggttttaacaagatgcaaggacaatctgaggactgagagccatttcaacgtgagcccccagtctgagaacaagaaagaagaacttctgtctcgaggtaaaaaggcctgctggggacctggggtccaggtgaagggatgggatggttgacagaactgctcaggtgaggacaggcttctcatgaggtccctgagaaacttgccttttggagggaaatgtcctctgccctctggagcctggggagaaggttatttct

SEQ ID NO: 13687 - DNA, 800 bp, Homo sapiens
cctgcctcagtttccctcccaacacctatatgtcttgttggtatacatgttgtattttcacaacgaaaatgcatgagaaaaaggacacagatggcttatgtgtactgatgtgtagcattctctaagatctgacatcacagagctggacagcacagctgtgcacgcacccccctggctgggaggtggcacatccacacatgagggaaaaacactgccaggacatctcagggcactctcaggaaatgaggaagctgctggagaagtttctagccttgggggaggtcaggacgcagagccatctcctggagcaaagttccctcctcctctctccctcctcctctctccctcctgcagcccttccttccgacccctggccctttctctccaaccttcccctcccctcctccatttccctcctctttctactttcagagaacacagggttcctgcaggaaatggggcagtttcaccttcctgaggaggggcctgggaggggcagcaggtggccgggtagggccagcccagctgtgagcctggcgtgggagctgcctaggccgggccctgccagggagcaagtctgcatcgcagaggccagggtgagtgggctggggagtcggtgcgccagggtactggggtgcccacctggggtggtgcaggcccggggaccccagggcaccactgtgggtggaagctgggaccaggcgtgcggggcaggggacgcggcggcttcctgggattctaggaggctgaggccaggtgtgtgcggcaggggacggggcggcttcctgggattctaggag

SEQ ID NO: 13688 - DNA, 778 bp, Homo sapiens
gagctcggattggcagagggacgcggggctgcaacgcgagtctccggaggtggaggggtccaggctgatgtagcgccgcccgggtcctgggtcggggttccgggaagtggacctgcgagccaagcctagccaagtcgggggacggaggctccggggcggacggagctgagggtgggcaggcgaggttgatggagcccttccaggaagcagggcgaggctcaagcacccagaaaaacctgtggctgccgaggtcccccgccagcagcgggcagcggagcgcaggggcggggctggggactggcgaactccgcctctctggggctgtcgctttaagggcaaggcggggcgtgcgggccctttaaggccacgtgggggcgtgtcaggaagtgagtccagggcccgcctcccggggagtcggcctcggatgtccggaggctcctgggctgagccggcgacagagcccgggaaggcagcgagacgtgggcgccggcccagccccctcccgcgtccttcagccccaagccccgagcccctctgacccttccgcagccctccctccagccgcgcccggcctccggcagctccctgtacgcctccctccccctgcccgcccctccctcccacagccgcccatgacgccctctcggcacctcttcccactctgccacgcgtccttttcctgcaccttcgccccgcgtacctactcctgccccgccctgccattcctctcccctcccttctctctgcgacccctccctgttaggccccagcctcttct

SEQ ID NO: 13689 - DNA, 775 bp, Homo sapiens
gagctcatctggagttccgagtaggttttgtaactgcaagtgctaggaaaatgcagaggcgccgacctcaggacctgtaggctgtgtcttttaagaattgcagaataagccccgagcaattcattttaggagctgttttataaaacaagtactttgaagatttctgcacagagaatgaaatattacaaaaatcacttgtgccacataggaaaaatggaaaagtgagatcttttatagaggaaataatttgttttttctttttgtcctcaaagtttcagagaggtagattactgttattgactttccagatacattttttttttttctgaagaactcaccacttttgcatatggaaatgtgctagggagatgaggaggtagataagaagccaggtcctgaaatatcaaatgggtgggaaagaaggttgcccgagacattacactagcttaagaggtggaggcggagacgttacgctaccgctaagaggtggaggtggagacgttacgctggcgtaagaggtggcggtggagacgctacgctggcgtaagacgcggcggtggagacgctacgctggcgtaagaggcggcggtggagacgctacgctggcgtaagaggcggcggtggaggcgctacgctggcgtaagaggcggcggtggaggcgctacgctggcgtaagaggtggcggtggagacgtttcgctggcgtaagaggtggaggtggagacgttacgctggcgtaagaggtggaggtggagcgtccttactgcacagggtgt

SEQ ID NO: 13690 - DNA, 725 bp, Homo sapiens
acagatgtcccagcagttctgacgcacctaggagagcggggtgggtggcagggcatatgtacgtgttttgaaaaaactcccagtcgatttttgttcattcctcccccaaaacccgcgttctacacgcccttgagacgacgggacatctagagatcctggagccttgggaaaatggcccgaggtcggcggctgacgcgttactatggatactccatagcttggagggccagtcgggccacaccctttggacgtcacccggagcccacaggagcacctggcaaaagccaggcccacttcctgctcggctccgcccagagcagggggcgggcggataggcgattccctccaatcacagttccaaaaggagggggctgacaacatatcctccaatcacagcttgaagtgagattgatgtgtcttttcaccaatcaccgccaaggcgcgagggggttgtcgggatgggggcgggagccaacatagagccctcagtgggatgagggtgaaactgctattgccggcggctcctgttttaccgcgtcagcatgctggtgcatttatttcgggtcgggattcggggtggcccattcccaggcaggctgctaccgcccctccgcttccagacattctcagctgtcaggtaaaaacggaaaaacctactcagagcgggccattgaccgcccggcagggcagtgccggcccgccgggagatggagtccacgagcttg

SEQ ID NO: 13691 - DNA, 716 bp, Homo sapiens
gagctcgctgcgcatgcgcagggagagcgcggccggcgctccagcggtcggcatggcagctgctacctcgctgggacaggctctgggcccacgcgtgccgcgcagtccctacagaactgcagttgtcttgtcttctcggagtgctttcggctacttttcccttattactttagctcgatacacgttgggctgcctttcacattcggatattacgctgttcgagtgctgacgggaaaggcagccctttgacacgcacgcgaaatgtcgcctgacgagggcaaaggtgacagttactaccggaagtaccctatctcagataccctttagattttcccccattgaagaaaaacgaggcgggaaaaacgctgttagggtttaactcaggccctggctccttctcgaacgaattagcggaacacccgcaggagccttgtttggcttccacttttcggcccgcccagttctctgagcgtgcggcggacgacgccggtgattggttgagcgaatggaaacggctcggcgcggtggttggccagtgggaaattctgtacgttgtgattggtccacaggaacgactcggcgcgcgcgcgggagcgagctttgaaagttgagcacggcggcggcgagccggtgccctgggatcatggtggcgttgcggggccttggtagcggcctgcagccctggtgtccgctggatcttagactcggtgagcaga

SEQ ID NO: 13692 - DNA, 3481 bp, Homo sapiens
caccgtgcacttttgaagtctctacttgccagtggccaccccacctctccctgccctcatccaaggacggacaggcctggcaggtggaccggagctgtggggcagaagcatcccaggcctggcctcagaggagggaggccatggtgaaagtggaggctgtctgcatccacctccccagcctttgtcaccgggacctcagcctgaccccaggcccaccccaggctgctcaccgaggtgggtaccctgcccaccgccagctcagatgcggtgtgtggactcccttctctctgggggtgagcgggagttccctcccctccacatcaggagctgggggagagctggagggccctgggatccccttgaccctggtcatcagccccagccctgacaggccctgcgtgtgccatgtgtggcctgggtttggagctcagcaccctgcgggaattctattaaatctccgattttatctgaaaacttcacccacatgttgcattgctctgtgaggcgtctgtgtgtgtccaggcagcagtaacaacgctactaatgctggcggccatcacaggaagccagtccgaacgtcccccaagggcctgtttcaccctcatgacaccaggcgtggcagagacgaggagcagaggcctggacctctcagggtctcagcagggggaggccggcctgtcacgagtgtttgatgaccatggagaggaggtggtggaggtaagcgtggctgcttccaggggaagggcgggcagtgctgggggaggggttctgtattgattaagcacgtactgtgtgctaggtcctctgtgggcttcatttaatttattgccacagccacgggagggaggggtggttagcgctatatttcagatgaggaaacgaggctccggtgaagacacttgtctagtcctctggctgtggaaggtgggaaagggatgtcaacctgggctcgggagagataaggaagctgaggcctagagccttgtcaggcctggagctgctgtcctcccgctggggcagcaccgcctgccttcatttagagcagcagatcctacagcacccgggtcctcacctatcaaaggcagacaccattcctgaccacgtgatggcctggacgagaccagtgtctgggtgtctgggtgtctgggtgtctggatgggaactgggagggcccggccaggcccggcacatggtgactctgcctgccctttgcagctgagagctggcctctcctagacctcaatgtccactgacacccagtgcccctgcaaccttctcttcctgccccacgaaggtggcactctcctgggggccgctccagccctctgcctggggagcaagcggaggggcctgggaccccacctgtgttcctgtctctatccctcctcagctgtcaccagctttaattaccccggctccatccgccccggcccctgcgcagctggagagccccttgggcgggcgcagggcccctcgcctgggcacgcagcattcctgcattcctccccggggcccaccgacctgtcctgccggttgtgggcagcttccgggtgcggggagcccggcgtgtgtttgggggggtgcgcagctgctggatggggagcctggagagagcccggctgtgccccgggactcccagctgcgttgcccacatccctctgccaccccgcatcacgaccggagcctggcaagaagtcagtgattcatcactcgggccctgggggctgcctggaggggctggggtgcttctaacagcaggaaagggaaggcaagagagaaccttccacagttgggagcagcaaagcggcccaggaagccccccaacaggatgggaccatctaaggttccagccaccccaaccccccggagcagggcccccagcctagtggtatgtggataagccctgcctggggtgcaccttctcggggagaccctctgctctttgggctactgtcctggggagcctcccccttcctggggctgggtggaccagctgcggaatggcagctccccctggaggggctggggaagaagtggggcgtgctgtccaccagctcctccctaccccgaggcgccccagatgatctgcctccagctccaaacaggagtagtggccacctgtgagtttctctgaggcccaagtggtcactgccggagctgcctgtgtccctgtgtccggacaggctcctctccacctctgtgtttgggcagctctccccttgtgtctggaatttttagaaaacggaaaaagtgtagacaaaagcaggctttttatctcgctgaatgctccaacaccctccctagttacaccacggtagtggaagattcagaggaagtttcctcctggtggccgtgattaccatctgcagttcttgttcggggacattgcaaaggtcacattgtccgtccagccccgccccgccctgacgttgctcccggagtggggacgggctctgaaccaccccagctctcaggggccccgccctgggtaacacacgtctgcggtgttacccacgactgcctgggacctggccaagggctccacacaccaagaccaaggtgaggggaggtggtgggtggggaccagccctgcctctcttggagaccccgagggtatggcgccaggccagcctggagtcgggtgtggggcggttagtgtgagcattacgtcttcttttccctaaagtggctgaaaatgtccccggggccagtccctcagggcaccctgctggactcaatgcagcagaaagagttggggtgtttggccgggtgcggtggctcacgtctgtcatcccagcactttgggaggctgaggcgggcggatcacctgaggtcaggagttggagaccagcctggtcaacatggcgaaaccccatctctactaaaaatacaaacattagctgggtgtggtggcagatgccggtaatcccagctactccggaggctgaagcaggagaatcacttgaacccaggtggcggaggttgcagtgagctgagatctcaccattgcattccagcctgggtaacaaagtgcgactccgtctcaaaaaaaaaaaaaaaaaagagaaagggttggagtgtcccatcctcagggcaggggtcagagctgcatccctggggtgccctgagcttgggggtcatgataaccttcaccctgcatgcagcccaggcccacacctagaagtcttgtggccttgagcacactgcgttgcctctctgagcctcggtttctccatctataaaatggagagggtaacagtgagagattgctattggctggcttcgttcattgggccctaaatcaaacagtggcttaaataccagaggcttgctcaatgggtggtgggcaggcagccgggctggggcggcgccccccccatctccacggtgtccccacctctacagtgcctccccctctccatggtgcccccccaccacggcctccatccctggggtccaggtttcatttgttcctcagcaa

SEQ ID NO: 13693 - DNA, 3468 bp, Homo sapiens
tttgcattccttctttggagaaatgctgtacatttcattgtttattccaggcaatgtcctcaaggaccaagcacagaggaggcgtggggcccctgcagtgccctcagggcagcctgacagagaagcagggcaaacgggaactgacacagcctttcgattaaatgtcaatctttgatttgacaatttggggtcattttctaaatccaacttaaatacagagcagctggaatgtgaagatgtcattcctggggttcctgcagatttctaagtataagacgaagggtgggcatccttatagaggagaattgttagtgtgcgggggatcgaggtgtgagggtggagagaggatcctttctgccagctcaccaccgcagatgggctgtcctggaaggacttggtctcagaccctgagttaaaacggccttcattatcatgatgtcattcattcatctagcacatttttatcaaggactactgtgtgtcccctgctgttctaggtatggataatgcagcttcaacaaaccactgagcttgtccaggcctaaaacacagaacttgccacggtctctcatcctccctcactctgcgttcctcacagcctccacatctgcgaagtgcagcttctatttccctgctcttcctccatctcctgctcaccctctcctctgcacactcttttctcctcgcattccatgtcttttcatcatttttgtcttcaaattctcttctttcttaggcagcctcaactgatattgatcatttcattatcacactccttattgccagagggtagaagttgtgagtctccacggtcaggcagggaaagatctttttagctcttccatgacagagctctcggctcaacatgtccaagactaggagaagagaggcaggtgccagtctcatcctgggcaattgtgtgaccctgggcaggcttctctcccctttctggattccattcttccttatttttaacaaagacaacttgggcattcatgtatttttaggattgatgaggtaatttaggtgaaatggcctgctctccccaggagggaagagtgctagtgggaattctcctgctgcccagagaggcttatacttctggccaggcatctggacactccttacatattgtttccaccagatttgcctggttctaggggcaagaactgtaaagggcctgagatgtcaccctacttgcaagccaaaatttagcctgccacagtttcatgggtgctttggaagacacgagagtcctgggtcagagacaaaggactctattcctcacagtgcagcaaggggcacaaatatcctgtttgtgctggctgcctttgccttctcagtcccacagaggcatgtggagcagcctgtgtatgccgcacgtgcaggcagtttgcattgctgctgcatatcccagagttaagggaaccctcatctttacagtggtctgcaagcagacctgtgcaaactttgctctggaggaaggcattatatttgttaaactggacagtaaacaaacctgcctcttgctctggagggagacgctatctgtatcttccaaggctgtttgctctacacacattcttgaagagatgatctggaatgaaagctgtcagtgtctgtgcacagcaattgtggagaatggtgtatcaacatcctgtcctcggctggacatggtggctcacgcttgtaatcccagtactttggagagccaagtggggagaatcacttgagcccaggagtttgacatcagcctgagcaacatagtgagatccccatctctataagaaaaaatttaaacaaacaaacaaaaatcaacatcttgtccttgcatctcctctgggagatctcagcactacctctgcctgcaagccccccgtgtgggtttcaccccctcctctgcagggaaacagccttggaagttgggatgctacttcccctccatcttagtgtcatagggctgctgaaacaaagtccccaaaactgggtgacttaaaacaacaggaatttattgtctcagttctggaggccagaagtctgaattccaaggtgtcatcaaggccatactccctcttaaacccatagggcaccgtgccctgcctcttcctagctcctggtggtttgccaataatctttggcatttcttggtgtgtagatgcattgttcccatctctgccttcatcttcatgaggctggcttctgcctgtgtctcctcccatcctcttcccttcatgcatgtttgtccctgtgtcctgatttctcctttttgtttttgtgttttggagacggagttttgctcttgttgcccaggctggagtgtagcagtgcgatctcagctcactgccacctctgcctcccaggttcaagcgattctcatgcctcagcctcctgagtagttgggattacaggtgcctgccatcatgcccagctaatttttgtatttttaatagagatggggtttcaccatgttggccaggcttgtcttgaactcctgacttcaggtgatccacccgctttggcttcccaaaatgttgggattacaggagtgagccactgcacccggctgttttccccctttttataagggcaacagccacgttggattagggcccaccctaatgactcattttaactagatgactctgtaaagactctccaggccatctccaaataagatgccattctgaggtactaagagttaagacctcaacgtgtctttctgggggatactattcaacccatagcacatcccctcatcccccatggaataaccgggtcagaggtggagcaggtaggactgaactagagaatgtgccccttggtgggtggccctttccctaattaaggcacctttctttgggctgagacttctctgcaaagaggggagggggaaaggatagttaaatttgtaagtttcatggcactccaagtcaggttctgtggctttctgctcttcctttttctggttttcagatgcagatgctgttgctgcacagatcctgtcactgctgccattgaagttttttccaatcatcgtcattgggatcattgcattgatattagcactggccattggtctgggcagtgagtacaattcattatttagtaggatctcaaatacctagccaagtagttaaactttcatgagcgccccctctcatcccagcattttgctgctgcccagccttaattactggaggcaaacatccttttggtttgctgacttgaagttttatttgcccacatgaatgtaaagtcagtctggggtgccgcaagggctgctggccatgctcatggctttgtcaccaaggaacctgcccggttaggagtggccaaaggcagctgatgaaatagaatcctgcaggtgggagggaggcactgaccggggcagcggggagaagacaaagagacctattcatgcaatgcaggcgcaccagctgtttttacaataaggtgcatgtggctttt

SEQ ID NO: 13694 - DNA, 3284 bp, Homo sapiens
tttgataccagcctagccaacatggtgaaacctcatctctactgaaaatacaaaaaaattagtcgggcatggtggtgggcacctgtcatcccagctgcttgggaggctgaggcaggagaatagcttgaacctgggaggaggaggttgctgtgagctgagatcgcactactggtctccagcccgggcaacagagagacaccctctcctcaataaataaataaataaaataattcagtacattcctgaactcccacagaagtaacagaaaccccctccagccaagcgtgaagagagaactgaagtcaggctggcaaacaagatgaagccacagcaaccttaggctatttacacatttcagaaatctaaagccaggagtttcaacggccactcaacagatgggaaagaaggtcttgggcctacacagttacagtttaaggagttggaacttagcattccccaactcaacacttaaatctgggaccctccaagggctacagcctcagtgaataggaagattggctagaaaaaaggtccgcccccaccagcaaagttagacagcatttctggtgggaaaaaaagactccctaaaaaatgataaatactggtctgccatcacacaaactttgggtttgatggcacaccactacctttgtggtcctggaaaccataaacttaaaaaagtaacttaaatggtctcagggtggtagttcccctgggaacctggacagagtaaatgaaaaatccttcctggagcaatgtatcctgtcccacagtccctttggatctgtcaaacatgaatttgtaatataattgcaaaacacacaaggaaataagccactgtgagcagcaggcaccagaaacaagaaagagcagaattagtttccctgagagtctaaaatgctagaattatgagatatagaatagaaataattatgtttaaaatgtataaaggaattgaagatggacttgaggcagggaacataatactaccccaaataactaagatttgaaaaagaaccaagtggaatttcacaaaatgaaaaatataatcattgaaatgaaaaattcagtaggtaggataagtagcaggtcagacacacctaatgaaagagctggtgaaatgaaagaaattactcaggatctaacagagagcccaagagatagtatagaagttagttaagagacatgaaatatggaataaaaaggtctaacagagaagagagaagaaggtggaaagagtggaatggagagtgttccaacagacctgggtaaagatggtgctggcctggaccagaaggtattgggcatagaaggggttgattgagagatgttaggaagtaggctgtggcttatacctataatcccagcactttgggaggatgaggtgggaggatcacttgagcccaggagttcaagaccagcctgggcaacatatgagaccctatctctgtaaaaattctttataaaaaaggaagtagaaatgatgggatttagtggagtttagtgatggaggggatgacagaggccagagaagggatgtggcaaagatgattatcagatttttggcttggggaattgggtagaggagtgttgcttattgggtagaggagtggacaagcatggtgtctcacgcctgtaatcccaacacgttgggatgctgaggcaagaggatcacttgagcccaggagtttgttgagaccagcctgggcaacatggcgagaccccatatccaccaaaaaaaagaaaggcaaagactgggggagaacagattgggagaatgaacacgagttcagttttgaaaaagacatgtttcaatttgcctgggaagatctactgatgcatctcagagtgggagactttagagctgggccctaaggtatatgtaggagtttacctggtggagagggaatttcttttaactaacttctgggaaataggatttcccttcagggagagtatcaagcctctttctggaacattctttcactcaaaggaggccccttgagaagaggcattatcaaaacatcaaataggcagggcttctgggatctcttagtttcatctctcatttttatatgggaaagctgagacccagaaaagtcaggggtttgctttcctagccttagactcttcattcattcattcattcattcattcattcattcattcatttacctaacagatatttattaaaagcctactttgtactggatactagttgctggggatacagcagttaaagattcttgcttcctggaagcttatagtttagtggagggagacagacaataaacacaaaaataagtaaaatatatcacgtcagagggtggtaaaagctatagagaaacgtaaggactggaaagggctcaggtattctggaggagccattggcaaagtgaatttgaaaggccctgggcctctcgtttggggctgctgacccatagtgtgacagcccattgtgacaacgtcagggattctagagtccaggcctgggggagggaggaggccttggagaaggaggagggaaaaaggggctgtgggatttagtggctgggctgcaccccctgggggggcagcagagcccaatgggccagaagggccacaaagactccctttacccttgtggagggtaagatcattgattcctgaggcctctttgcaccttgcccttggcccctcccccacctccaacagatctctgatgacattcccttctgctccccctcccacccttgggaacaccaagaggtgggtccaaattgtccctgcgtcccagtacagagtggcagcctggaggagctcgtgacaggcacccaaggctggccagggaggctgagtagaccctgtgaggctctgttccagccaggagaggctggagggttggagggcccctgtgtcatgccccgcatctcttcccccaggactcctgagagcagcctccatgaggccctggaccagtgcatgaccgccctggacctcttcctcaccaaccagttctcagaagcactcagctacctcaagcccaggtgaggctcaagccccggttggggtagggggtgtgcatgacggtcagggagaaccagaggtcttgtatgagaggaaccctgtgtaactaaatgcctttggctttctgggtcaccaggacctctgagaagtcccataaaaatggctcaagctccattccacggcctgtgtgcagccaggccctctccaaggtcactgtgacttgcttcttcttaggctcttgagggttcttcacactttgttacttgttcccgcagaat

SEQ ID NO: 13695 - DNA, 3283 bp, Homo sapiens
gtgaagacagtgctgacagatgggaggtggggctgacaggacgaggggtcaggatgttccggccatgcactgtagccctggccttgcaggacagcaggtggcttggtgggatgataggtgagttccgtgggcaggcgcagggcatgagctgccagtgtcttcctggaaggtgactctggggttgtcgctccagctggagtgtaccctcattcctgcttccataggggtctccatggaggcctcattcaaacacaggcgagcccatccctggcctgtcaggttcaccagggtggcccctggtcccgttgtcgccgttgtccacaccctgcccacctgccaatgctcctgtgtcccctgctctgctccagggccccaaaccctgtgcagagctggggtgcatcatgctgccgccccatggagaaggcctggaggagatggaagccgggaggcttcctcttacaggaagggaagccccagaaatgtgcctggcaccaagaaactgctccaagcttgttccagagtgtggggagggcttgaggcctcccctttttgagtacatggaaaggaaagcctggcattttctggaaacgctcccaagtctccctggcagggagatgtgggaagagtccaggcgcccaagctcttgcatattcacttcctcccatcacacgtgctgtgtacaagcaccctcagagctcgctttgggagacccctgcctcagggctgcgggtgccgccgtccacaccacaggcccttctgcttcctgtttccaaagctcatctcctgtctctgggctgcaggcgctgtttctggtttactggcacaactgtggttgtgtttttgtcaatgacttcatctttgctgctgttgttttgagatactgtcttgctctgtcacccaggctggagtgcagtgccgagatctcaactcactgcagccccgacctactggtctcaagccatcctcctgcctcagcctcccaagtagctgggactacaggtgtgcagcaccacatccagctaagtttttgtattttttgtagagacagggtctcactatgttgcccaggctggtttcaaactcctggactctggtgatcctctagccttggcctcccaaagtgctgggattacaggtacgagccagcatacccagccagtgttgtcgttttgatttgggagttcggggctgagctgtgtttggccagggcctcgcctgctcagtgtgctcctgggctgagctgcggtcctggagcatctcttggctcacatattgactcctccggcctctctactgtcctggtccttcatggggctcacatgtgtgtcctcttgttttctttctgtcaccttcttaagggttcacagatcactgtcagtggaaggtgttgccacagctcaagcctcacagtggaggaacctcatgaggcccttcacggggccactccctgtctggacaggcctgcctgaccagccctgctgggaagcctgggctttgctgctgcttcaccctgcgacattctcctcaggccctgcctttcgcttctttcgttaacattgttcctgccttgatcgtttgctccctcctgcctaactctgctcttcttccttgtgtagcagttacgtggtcctcaaatatcatttgttgactccagtgtttcctggggcatctcctcaagctggctggggttctctgcatctcagctgtggcgcctggtgtgagggcgcacgcttcgcagtgagagtgaaatgcccagttcgcgctggcagagggagaccctgtgaaggtctccctgtgccaggcacaggctcttattctgaaagcagaccccgtgaaggtctccctgtgccgggcacaggctcttattctgaaagtagaccctgtgaaggtctccctgcgccgggcacaggctcttattctgaaagcagacccagtgaaggtctccctgtaccgggcagaggctcttattctgaaagcagaccccgtgaaggtcttcctgtaccgggcacaggctcttattctgaaagacccagtgaaggtctccctgcgccgggcacaggctcttattctgaaagcagaccccgtgaaggtctccctgcaccgggcacaggctcttattctgaaagcagacccagtgaaggtctccctgtgccaggcagaggctcttattctgaaagcagacccagtgaaggtctccctgtgccaggcagaggctcttattctgaaagcagaccctgtgaaggtctccctgtaccgggcacaggctcttattctgaaagggtacgcagcagtttctggaaggaaggaaggagggagggagggagggagggaaagaggaaggaaggaaaggagagcgataggcacagaggaaggtagatgaagccccgcgcccccctggcggagcccagccctgttcaccgcgtgctgtgcgggtgcctgtgccaggatcagctggctggacggctatagccccacgcctgcaggccacatacctgggagagtgtgggccttccgagccttctggctcccggccccacagaggaattacggtcccatgtccctcacaaggacccttgcagagggagcagtgcatcggcacagagcaggacacaggggagccgggctgaggctgcgggtcccttgtggccgccaggtgctcacgcgtgcctcggtggggatctggcagccagatttggggtgaggatttgatgatgtgggtatccctagctggtcccacagtgacgatgggtgttgcgttgtgagcatgtaaaacggcagtgacgtctgagggtccctggacgtctttcacacccagcctcaaagcggagcctttccaggcagagcagcagctgccgccactggattgacagccccagagcagcgggatcaggccacgcggacgaggaggtgcgaggcctcgggtcggggcctgtgttctgcgggagccgcacccatcatcgctgtggcggtggcagtggagcagctgctctcgtgtctgagctgctccggcgtctctgtccacagtatagggtcttctgatgcttcctggaggtctcggaggggcttgctgcgtgtagtacccacacagcccacaactggggtgttgtcaagtgttatgacgtaggttgcctgtggagtaaaagttggccgctaagaaatgctctagacaggccgggcacggcggctcacacctgtcatcccagcactttgggaggccgaggcgggcggatcacgaggtcaggagattgagaccatcctggctaacacggtgaaaccctgtctc

SEQ ID NO: 13696 - DNA, 3237 bp, Homo sapiens
gcctgggctctgtctctaaaaataaaaaaattatacttttataaactctttccttgaagggttaaatgcatatgaggaagcggcacatggacttccttggcgcttcccccaccctccctttctaccttgtgtccataccaaattttgtgatttatcactaagtacaaattattagttaagtgctataaagattcttttgaaataccttttgggaaggatatagaatttattttaagagcataaaactagacaactggtgtttctttattgcttgctttggaactcatattcctattggagttcccaattaggcagtttgcgaatgaaaatttctaaatcttgggctaaagcctgttttggtaacaactttagtccttatttgaattacattagtaggcatgtgtacaacctgtaacttctgagatatttggtccttgagacttctagcggcattaaaaatatgacaggttctaggctctcggtacttacacacttttctctcttttttttttttttttttgacaaggctgctaagagaacactgcaatctttgggtagttcacccgttttctttactgtgcaaggttcataaaggcaggcactatgtctgtcatgtttgtcactatatctcccatgccaaccacagtgtgtacttcacataatgagcatttcaaaggcaacatttggtaaagagatatgaatgaaggtcttacactgaagcagtggggaacagtagaaccagcctaagcattagatctgggttcaaattccagttttgctcattatctatgtgatctacagcaagttgcttgacaaactttaatttttacttttttgtaaaatgggaataatacctattatataaggattataagaatctataatcatttattaaaactaaggagtgtttagtgttttcttcgtaatgtgtttcaaaatatgggctttaaaaattgagtgaaatacaattcctgtccttaataaatttccacatacgatagtaagacaaataaaaaaatactacggaaattttatgggttttcaaggtcgggagtgatgatgtgtttgagggaattaggaaaggaggtggcatatgaaaaagtccttaagggatatttaggatctcagcagttaaaatgggtaggcatatccaaggtaaacaaagagaacataagcagggaggtaaaaaggtactgagtgtgactgaagaagggccagttactcctggctgaactgtaaggttcgcacaggaaagtagagatacgtcagaaatgtgtggtggggccatattagtggtgacaggttctttctttaatccagtagacaatgagaaacgctgatttgggtctatggcataataggaagtagtatgccacatactgcatgtgggagttctgcaggacagattgggaagtgcatgcgtgtaagactgggaagaccagttaggagaggctattgcactgttttaagtaagacataataaagccctgcaccaggcggagagcagaaggaacgcacagaagacgcaggagaggcacatttcagagagaatccagtatgcaatggatgtcgcacacaagagagagagacgcaggtgaccggagccatttacactaatgggtaaatctcgggaaagcgctggtttcggctaccggccagttacaggtttgaggtgcccgtcgccgccaccttccctttttttatattcctctttttctcatggccgcctccgcttccctccatctctcccgcgctagtaactgagctttcagtcatcgacctgaccctgcgttttccctcacgctccgattctgcttcctatcactgcctcctactgtactatcacagccaggacgagcacgggtcaggcactgaggctgtgggacactccacccgcctggtcccctatcgcctccgcctaggcagctgccatgcgtgcgcccccacagctctaggaccaataggcaggccctagtgctgggactcgaacggctattggttggccgagccgtggtgagagatggtgcggtgcctgttcttggccctgcagagagctgtgggcggttgttaaggcgaccgttcgtgacgtagcgccgtcaggccgagcagcccccaggcgattggctagacaatcgaacgatcctctcttattggtcgaaggctcgtccagctccgagcgtgcgtaaggtgagggctccttccgctccgcgactgcgttaactggagccaggctgagcgtcggcgccggggttcggtggcctctagtgagatctggaggtgaggcgggcggtgaccgagaagaggggcaggggcggcggggagcggggcggagatgggtgggagcggggtttgggctgtgttggtggcaattctggagcttccctcggccctgggaagtggctaccggcagctcctgcggacctggagggggctgcggttgcgctttgtcggtgtggcagctcggacccgcggggactgcaaggaatgtccttgaggcccggcaggccgagcggcggccggcatcagtgccggagtaacccggggtcccggggtgggcttgagaggcgggcggcggtctggcctcttcgtgactgcggtcatcatcggtggacccgcggggcgtagctgcgttcatcgtccctgttcagtcagagtaggcagtgctggctgcacggtcacgaaaatcggggcggaaagggtgtcaggcagggtgacctcggaggcccctggattcgagaaatgctaggggtctatggggctgtcgggccggcagctcgcagggcagacgggagaagcgcctgcatcccgggatccgggcattcacgcccaggaactgctgttcgttagcacctttcttttaggtgacgggaaagatctctgtaaatactgctgactaacttagaaccatgaaagaaccgtggattggtgtagatgtgtctggttatttacaggagaacggcttgagaggatgcggagcccaacgtggggattcgcacaatgactcaaaagattcttctccctctttttttttttttttttttggtaaggggtgtagtctccttggtgctgatattcttttaggaaaaatgtaccttggagatacaaatatagaacagttaatttctgcagtaggaggaggtcgatgtactccattcttaagtagtcgtttgaaatatttcaggatttgaggatattccttcttagacatggtcctgcagagtcgtaggaagcatttgt

SEQ ID NO: 13697 - DNA, 3194 bp, Homo sapiens
agaatttcactcttgttgcccaggcaacatcgtgcagtggcacgatctcagctcagtgcaacctccacctcccagattcaagcgattctcctgccttagcctcctgagtagctgagattacaggcatgtgccaccacgcccagctaattttgtatttttagtagagatgcggtttcaccatgttggtcaggctggtctcgaactcctgacctcaggtgatccacccacctcggcctcctaaagtgctgggattacaggcatgagccacagcgcccagcctcagctggctgggttcttgagggaggtggaagtgggcgatggctgctgagagggcatgtaccagggtccagcccaaacagaaggtgcacaggctggggacagaagagctagggtatgggtgtcggtgctcacagtgtgtgagcttgacagcacctgggactgtcttggagtgccgccgcattccccatgagtgagtttgtattgtatatcctgggatgctccagtctggatggaatctgcacgtgagtttgtgtgccttgcaaacaaaccttccctgagcacctgcactgtgtctggtcttgtgctgggcggggtgcccaggggaggagcccttagctcaccacagtgatcaagacatccctggccctgccctcacaggctcacagtccactgagggagacagacctatccccagccagggacccccagagtgtgccgggctcaggtgggggagcccagagggggaacctgacccagccagggaaggcagaggggacttcctggaggaggggatggtacagttaatcctaaaaggtctttcccaatgtaacagttgctctgtaggatggatgcagtggctcatgcctgtaatcccagcactttggaaggcaggaggatcacttgagcccaagagttggagaccagcctgggcaacatagtaataccctgtttctattaccaaaaaaatacaaaaattagctggacatggtaacacaagcctatagtcccagctacttgggaggctgaagtggaaggattgcttgagcccaggcggttgaggtttgaatgagctatgattgcgcccactgcattcccggctgggcaacagagcgagaccctgtcaaaaacaaaacaaacaaacaaaaaaaacgttggtctcctgtatgaccaatggataaagtaaccttgaccagtctaataactcccaggctgacctgtaatccaagccttctctgtatgtctgagcaggcaaagcccagctccagggctacctcaacccccaggctgatcagaagcttgggtaacctctcccagtgtggccagcgaccccccaccctcccacgttctgaccactgtcctgggcaactagtgacatctagtgggggattttgtcccagtctgacctggcctgtaggggccttgggcagtcggacctgtgacccacgcttcctagcagtggctggactcctcccccttcccgcaggtgccctggcctcttcccctgccctcctcacctgctctggccagtctgactcctcccttccccacaaggttgggagggaatgaaggagagagcgggaaggaggaagggagggtggcattcctgggattccctggatagggggaagagtgggagggccttccatgggtgagcaagcagagagggcaccccgtaccccacccccagccccatcatcgaagcggcctaggaggacctggatttgaagaccattgaaaataagagattaaaccggttgattccaggctactggtcagacgaggaaagcagcccagagcactgaccacaggggaaaacatctccgggcatactgggagcagctgctgggggccactggtcaggctgcgggggtcactggttggactgggagaggccagtgcaggccactcggacggcacgcttggggccattagttacactgggagaggccatcgcaggccacaggttgcagtggggtcctctggttaaaatcgacgatgccagcccaggctgctggtcacagtggggacgagtccccaaggcccctggtcagaataacgaggagaaggtccgcgattgcctggtgagatcccagctcgggtcactggctacgctggtcgatcaggccccccgctgcaggcgctggtcagtaagcccggacagctctaggcttgggggcggacgagccccgagcctggccccgtgcactgggaggtccgctccgggcagtgggaggtcctggccccgcgcccgggcatcgggggacgaggggggcctggagggcggggcggggcggggctgccgggggcggggcctctggctcccagccccgcagcggccgagctgcagcccgggctcagtctccgccgccgccgtgaacatggagcccccggacgcaccggcccaggcgcgcggggccccgcggctgctgttgctcgcagtcctgctggcggcgcacccaggtatggctcgggctgagggcaaggtgggactggggagaggcccctggggaccccgggaaagcgaggagaaagggctttaccctgaccccaggaagcaaaatgtggggaccccaaggaggagggatatgggagtgttggaaggtacgccttccagtgagagagatctggggacagccaggcaggagagctggggatacccaggcggtggatcagagacaaccagagaagtcagcccccttcccactcagcaccctggaatctgggtcccacctgcctcctccctcagaccctggaatctgggcccccagcccctctttcctcagacccaggagtccaggcctccagtggctagaatagcttcccccagggcacagaggatcaaaaccccagggctctctccctcaaaggtcctcaagttttgagaggtccagggaccccttagagaagcgaggaccatgtgtccccacaccagcgatccacatgtatttaggagtttccagagtccagtataaagaacccgcctccctcaggaaagggctggagcaccagccccgggcagtgacagtggaacaaagtgtttccaagtgacaggcccccttcctggggcctcagctacatttacacacctgcatgaggatagaaggagaggaggccgggggctggggggtgggggtgggggtgctggggacagagggacagagagatgagagagattggggaagagagaggaactc

SEQ ID NO: 13698 - DNA, 3192 bp, Homo sapiens
ccatcacaggccttcaatctctagccagcctagacacagatgtgcgtgggccgacccagcaaggggcaggaggaaaacccctctgcttcctgtccccggcttctcccacttactcccccgccccccacctctgcccgtctaatggttccctgggccgactcggtcgccctgccagcctgtcctccttcactcaggcacacactgtttccacgcccgggagcctggctcacttgcagagctataaaaacagacatccaccaggcacggtggctcacgcctataatcccagcactttgggaggccaagatgggtggatcacctgaggttaggggttcgagaccagcctggccaacatggtgaaaccccatttctactaaaaatacaaaaaactagcctggcatcatgtcatgcgtctgtaatcccagctacttgggagactgaggcaggggaatcgcttgaacccgggaggcagaggttgcagtgaaccgagatcacaccactgcactccagcctgggcaacaagagcaaaactccatctcaaaaaaaaaaaaacaaaacaaaaacactcagacatcaggctggccgccgtggctcatgcctacaatcccagcactttgggaggccgaggcagggaggatcccttaagcccaggagttcaagatcagcctgggcaacacggcgaggccccgtctctactaaaaatacaacaaaattagctaggtgcagtggtgcttgtggtggtctcagctacttgggaggctgaggtgggaggatcacttgagcccagaaggcagacagaggttgcagcactgcactccagcctcggtgacagagtgtgactccaagtcacaggaaaacccaacaaaacacagacgccgcccccacctgctttgcccgactctgcagagtcccacccggatgatctgggggagggaaggagtttgtctttttcgaagccctctgtggttttcggatgagcggatttagggacagtctgcacatgtctttcactcctgctatggaccccagaacccaccacagtgcctggctaaattgcacgtgcttaaataaatatggaacaaatgaaccaactgacctcttttgatgttcccagccattctgtgaggcagaggatcaaatgggtattattgtccccatttgacagaggcccagagaggtgacaggaattccccaaggtcacagatggaggggcccgaggctgcctcccactaccaggctgatttccagaggcttaaggtgggggctgagtttaaggaggggaaaaagaaaaacacatccccttacctagtgggtagagaggagtaggggcaagggagagaaaagaggaaacgaaagaagaggggaaagaggaaagaagaaggggaaggttagagatgcctaaaagcatggaactggaggaaagacatcaaaataacaaagagcaagactagccgcgtggtggctcacgcccgtaatcccagcactttgggaggccaaggtgggcagatcatttaaggtcatgagttcaagaccagcctagccaacatggtgaaaccctgtttctactaacaatacaaaaaaattagctgggcgtggtggtacatgcctgttatcccagctactcgggagagtgaggcaggagattcacttgaccctgggaggcagagtttgcagtgagccgagatcatgccactgtactccagcctgggtgacagagtgagagtccttcgaaagagagagagagagaaagagagagagagaggaaagaaggaaggaaggaaagaaaagagagagagagagggagggagggaagggagggaaatgagggaagctaagagggggttgggctgcaaatcctatctctgggcagcgggtctgggcccctcgtccctgcagcaggtctgggcccctcgtccctgcagcgggtctgggcccctcgtccctgcagcgggtctgggcccctcgtccctgcagcaggtctgggccactcttccctgagtttgatgcttggtttggagtcagggctctgagcccagagtccctgtggaaaacacatccctccactgactatggcctctgtcccacaacctcccccctccccaggcctgtgtgtgtttagacagcttgccctgcatttttagaacaatttttaacttgtaggctgtacctgcggaaccagaatgtctggccaagacctgttacctaacagcctcagaccatttgggtgccaacagcaactgcagctctggcccaagccaggtgtgggctgacctagccagggagcggggaagtgaaaggaatgggtcccttcccactcagagggcggagcccccacttctggtgagagaaagctgagcagaatggatctaatctgattcctccacccagaagcccttaaaatgcagctttgttttaagccttcttgaagatttgggctagatctagaaaagaacctcaccacggaggatgtgcaaagtacaacacgtgaccccggagacggaagctcttctctacctccgtaaagatgatctctgatgaacagacatgatcatgcctggagaacagggatggacagtcccgcttctgaaagaccctgtctggctgatgattcatggtgcgccgggcagaccccaggccaagagaccccacccacagtacctgagtgctcagctgggaaccagaccagacctcaaaacaggtttgcagaattaagatgaggagctgagctcaacacagcctccgcagctccccagggcgggcctgagccgagggagagcccatggccatcagggtgctggaatgcatgtcacactgcattacgtgcattacgatccacgctgcaatgacagcccagagcgtggagaacccagagagggtggggagatggaatcccggcgagccagcgctggcagggaccacggggagcagctggtccagccgccggttttccaagagagaagactaagaagtgagtcacttgcccacagccacagagagaaggagggcaacgaggccggcaggtcagcagcgagcagttagttcaaggccttgagggcttccactaactttgaagggcgaggatgggcggagctctggaggccgccggggtaggttcgaggggagtgttcaagaagcctcttttttttttttttttttttttttttttttttttttgagacggagtcttgctct

SEQ ID NO: 13699 - DNA, 3120 bp, Homo sapiens
gctggtcttgaactcttgacctcaagtgatttgcctgccttggcctgggattacaggcatgagccactgcacctacctgtttgttttttcctaaacaaatagtactgtttcatgtgtcactacttttgaacacattgctctctcctggaatgtctttttctttcttcttatctacttcctgtccaactgaccttctcatgaagtttctccctgactccctgatttgtggtccctggtttgtgttcacttagcaccttgtatcataatacttttcaccctgtactggaataatgaaccagactacacattccttatcagcaaccatgtctcattcagcttttaatcctccaagatgctccaagtatggcatctgacacataagcagtgagggctcaggacatatttgattgctcacaccccatgccctcgtttttctctcagacatgtttacacaagttcttttgatcgggttgcaaccaaaagaaactgattttagtttctttgagcaaaacaggcctcttctagtaaattcactcaactgccactactttgggcaagccacttcattcagtgagtattaagggtctatcacatgccaggcgctgttctaaacccagaagaatcctgtttcaaagagtttataatctaagggagaagacagcaatagacaattcaccttttacaggaaatgcgcagtctatttctgggcagtgtgaggtgtatcagaatatatatagtattctggaaatcagggaagaagttgcagctgacactgtctggatgaacttcaattgctaaaaaatcagggaagaggatgctgggaagacaagagtaggcggcatttgacctggattttgaaagatgagtaggaaactgatgtgtactttggaggctgttgaagaaaaccagagccaaacagtagttgaagtggtaaaaacattttattcaggaactagtgcaacaggagcgagacctcagaatagatacagaactaagctcaattctcttattgcattagtttcttaatacctttttttttttttttaatcattggccctggttttctttaagtgggggaggtggtgattcaggacatttcagatacagacaaaagaatgaacaaagcaaaaaggagtaaagaaacttagagaaaaagtaaataatccaaagaaagttgagtagtcaaggaaaacaaattatttgtagccagagcctccagtaatgttggggaagtggcaagagatgagggacggtaggacttttttaataattcaagttaccaaaagtgaagttatctggtgatatttagaaaatgaaatgtttttctgtttattcctaggagctcaaatgggaaaggtaagtgaacaagtggctggaatgctatgccaacaagtttggattttatcctgcagcgccaactgggagttctccgagagctgtatggtattttacaaagggactgtagtctttataggtgataggctggagcagctcgtagcagtccctctcctggcctcagtttactcgctggtaacacgaatccggttggaccagatgccctcttaggtcccgtctaacctctatggcatgcttccgaggtacctctgcctctttccaataccaggacctgtgcctcatctcgtccttccttcatacctttgtccagctgccaccttccctagtccctggcctgcctcaggtactttcaatcaggaagtgaggggcggggagggagggaggcgcgtctccagtaaaaacaaactagtcccagctccgccgcctttcctcccaggcagcaccacctgggtggtgccccggggccagacgcgctctagagtgggcagggagccaagtttctcggtcgcttttccgtcctaggtctctggggtggtaggccgaccctccccacagccaagccatctcggggagcagagcaggagcccgtgcctcgcgcgttcctggttcctcagacacaaaagcctctaagtcccggcagcagccaccggatttcatggggacactccagtggcagggcctcggggcgggcctgagacggccaatcggcttctaaagaagtcgggttgtagggcccgaagagcagggtttcggccggggccggggccggggcggtgcgggatgctcggctgggtagcgtcccgggcgcgcgctgcaccgggtcacgtgaggcggccggggccacgtgacccggcgggcccggcgccctggcgctcctcctcttcgctgccggtgggcaccgccgctcgctcgcacttctgcgcccattggagcttcggagatccctgcggtcccgcgggacggcgcggcagcagctgacctcgcaggtagcgtgtgggcgcggggtcgagctcgcggaggcctcttccccctcggccctgcccctgcttcccttccccgcaggccgggccgggagtgccccgttactcctgtacctcccgcctccctcgctcgggctcccgggcagtccctgcgggcgctgcgtccggggcgagggatggggtccccggcccggccccgccagcacctcagctaatgtgctctcctgcgaggaggagggaaggatggggagaggcgagggaaagttttccctgcctccctctcttttttgaggtgcacggactcgattttgctcgtagctgaagtctgactgctgtgggtgccgttttactgagaggagatctcccctccgactcttcctattctctctcctttccaagatcttagcatctctccttcgtctcctgagagtagtgctgtcacaaaccgtattctttatcgtttccctttccgacacagaatccacaaaggcagggattttgttagtgaggacttttatccaggcgtgcggtgaactctaaataagtgacgtttcccttgtctgcctctgataaagtacctacctgctcggtttaagatgactatcgagcacgctgtgttctgctcgcataagtggccttttgtttttatttatttgcatgtaagacactttcaagccatctgcggaactctgcagctggggattacaattttataaagcagtcttgtaataatgcttttagaaaaccagattcatgatcttccttgcttttgccctattctttt

SEQ ID NO: 13700 - DNA, 3077 bp, Homo sapiens
ttgagatggagtcttgctgtgtcatccaggctagagtgcaatggtgtcatcttagctcactgcaacctctgcctcctgggttcaagcgattctcctgcctcagcctcccgagtagctgggactacaggcatgcacctgcccggctaatttttttgtacttttagtagagacgggtttcaccatgttgaccaggctggtctcgatctcctgacctcaagtgatctgcccgtctcggcctcccaaagtgctaggattacaggcgtgagccactgcgcccggcctgtcctctctcttcttgtgctttcacatacttgttttattcaccagtttatgtttaggtgtaaagtaaggatttaacttgatgttttcctgactagatcatcaaactccagtcttcctcaccaatatgtttcctatttgctatcttcctccattatgctatgtggcatataccatatacatttatgttctttcaactttttcaacaagtctttactagcctgtgcttttcatgtagataaaaaagatccctttcctagagaatttccagtctttgttaatgtgaaacatgtaatagaatacaaggttttttgaatggtgaggccttgtttatgcaaccctgtaaataaacatcaccttgctagagggcctaaagtcatgtgaaggggccagcacagggcttgctccgtgggcttctgtcgtgtttgtgtactgcatgtgggaagcagcagtcaggcaccagagccttgaacccaggatgctagtcccagttcaggagctcaggtcattgaccttaaactgctcctcaggatttctgggttttttttttttctcgctctgtcgcccaggctggagtgcagtggtgcaatctcggctcactgcaagctccacctcctgggttcaagtgattttcctgcctcagcctcccgagtagctgggattacaggcacccaccgccatgcctggctaatttttgtatttttactagagacagggtttctccatgttggctaggctggtctcgaactcctgacttcaagtgatccacctgcctcagcctcccaaagtgctaggattataggcgtgagccactgcgcctggcctaggattttaagtcttaacgagcattttggttctgctgatgacaacgggaaaaagtaacatgaggggactgattggtccccttatgttatatgggagcctttttttttgagacaggatctcactgtggcccaggctggagtgcagttgtgcaatctcagctcgctgtagcctccacctcctggactcaagtggtcctcccacctcagcctcctgagtagcttcggactataggcatacaccaccacgtgcccagctaatttttgtatttttgctagagacagggtttcgccatgttgcccaggctggtcttgaactcctgacctccactgacccacccacctcagcctcccacagtgctgggcttacacacgtgagccacacagtgctgggcttacacacgtgagccaccatgctgaggagactgttttaaatgctctcttctttggtttttcagcctgagagacactctcgtaagttacatgcaaactaaagaaagtgaaattcttcctgaaatggcatctcagttcccagaagagatactgctcgccagctgtgtctcagtgtggaaaacagctgctgtgctgaaatggaatcgagaaatgagatagaattatttcctcagctatctttggatgactttggagagaagactcctctctcctcgtctgcggcgtggacttgatcatggactggtgcctttgcattcagaaggagagctgtcagcgtagcaccgaattcaagaccaaggcgtgctacctgagctgacagctttttgaaagccgagctgtttctgaaccatgtacatacatgttctgaaactttctcatcattttatgagtactgttcattgagagatgacaatgaagattagatgaaattggaaataaaccaacattgtttacattccaggagacttgtagctcagccacacacgcagtaatgacctgtgcccgttcgcctctggcactgcccacccctctttttttttttcttctaattctgtactcacaaaagagaatctcattttcttctttcttccattcccttaaattctgagtactgtacatatatttctgggttcccacgatgatgtgaaaaactaccagactgttttttgtcttctcacaaagacaagaaaaatcagggcattttgtgagtgccttaagatcaaactaacaagatctgaccctctcccctcacagtgagccactgccccacttcagagggtaagagccaaaagcctcattgtgaaaggcactggacttggaccagggacaccatcagggccttggttttctcacgcataaaatggagagtggattaatcgccaaagattcttctgatctgacattttgaaattgtgagagaaactagatgactgtaaacttggtcacaggcctggttctggcagttctttgcggacttttttctagcattatgccaaataaacatgcagtctcagtgtgctctcgcatgtatgaatatctagtcctttctgtggttctcagccaagacataaaaactaggactcagagcacatacaaaaccagttatgtttcggaaagagggaaaagagtccccgagcccggatcttgtgctgcttttctcactgacgtgttgccttttttctttacaaaatctgctttgatacttaggacctctctggactaatttctcttcctagacagctcagcacagctattgatatgttagaggcagtatccttaatattcattctaaatgagttaacgacttaacttgaaattgggcctaaggagtgagaactacaaaaatacaaaatgcttgtccaggactcagccatgcacaccttgagcagcgccggcaggaggcacggaaggaactgtgctccgttctcctcactgtcatggtgccaccagtgtctgatgaagggcagagtgacccagactgcaggcagtaactgacttcacacagtccctggcatttagtcatct

SEQ ID NO: 13701 - DNA, 3035 bp, Homo sapiens
tttgagccatcagttctaggaggcctctagcccgagagtataagagagcagaaagttgctttgaacgccttgttcaagagcccagcgttggccaggcatggtggctcatgcctgtaatcccagcactttgggaggctgagacaggtggatcacgaggtcaagagaccaagaccatcctgaccaacatggtgaaaccctgtctctactaaaaatacaaaaattagctgggcgtagtggcgggcacctgtagtcccagctactggggatgctgaggcaggagaaccgcttgaacccgggaggtaggggttgcagtgagctgagattgcaccactacactccagcctggtgactaagcgagactccatctcaaaaaattaaaataaaataaataaataaataaataaataaaagagcccagtgttgtgttggaacaggaattaaaacagattaaagaatgtgtaagcagaaactcagttgtatgtaagaaaacccaattccccctgagaacaagaaagagctggagtcttttaaaaattaactgcctgtttttctgtggctagtgagccttatctctcctcccttcccaggcattgtgaaggccctgtttccctagttgtgcagctgcaagttcactagacagataaactcaagttgcaaaacatgttttgccttgaaaagtaagaaatgatgtaatgcacgtctcaattaattgaataactctctttgtctctcgcttctgtaatatgcttccccctgcacagatctcccccggccccacaaaatgcttcaaaggtaacttaactctttgttcagggctcagtcctttgggtgttaatcggactgggctggtgcagctaaataataaatatcctcctgaaccccatcggtctctctgattccttatcaatctcgctacagtgtcgtttgagaaaagaactgagcaccttgatcactgtcagtagcatctgtaaccccaagggaagggcgggtcttggtgaaaccctgtattgtggctcagcaggagaacgtctggtgggattggtaaggaatatttgcatttaagtggcttccgtgatcacagtatacggaatagcctctgcaaaggtgggcggggaccctataaaatctatttgctctcagccctaccaacaggcttccagggattatgcctccttgattatatgtcatttgcctgtagactattcatctgcctgcacattgagcgctcagctgtggtgtttgagttttcataggtacacagatattcgtgaccttgatttttacttgagaaactgtgaggcaaaatatccccagagtgctttaacctcaaaatattgacctaggatacagttgttgccacagttttttttaagtgtgttttcggtttttttgttttgttttgttttctatgtttttgttgttgttgttgtttttgagacggagtttccctcttgttgcctaggctgagtgcagtggggcaatctcagctcactgcaacctccgccttccaggttcaagcgattcttcccccttagcctccgagtagctgggattacaggcacccaccaccacacccggctaattttttgtatttttagtaaagacagggtttcatcatgttggccacactggtctcaaactcctgacctcaggtgatccacccaccttggcctcccaaagtgctgtgattacaggcatgagccaccgcgcccggctggctagaccattgctaatggctcaagagttcagttctagcaattgtgctgaccctagttagggaatggtaaagctttcgttggtcactcacttgaccccatgggcctccccaggtgtctactggtcaggagagagaggggacctcctccagtgtcatggaatctgacaacagactgaggacagaagaagctgcttttttctacggtggataccccaagggcccaggtttccctctaagtcagtaccactttcatttcaggaaggagaccaccgtggatgggggctgctgcctgcaggacccgagacctgaaaactgaccaatcaggcagctggggtggggcctagagaactgaccaatcaggggagttgaggtggagcatccggatgagaactgtcaatcaggggggttggggcagagcctggagacctgtcaaatcaaaggagctgaggcagggcgtggaaacatgaccaattaggaaagctggggtggggcctgaagaactgcccaatcaggggagctcaggggatagcaagctgaccaaccagaagaggaggggcagagtctaaagaactgtccaatcaggggagttgggatgtgactggtgaactctccaatcagagatgagcagagaagagaaccatccaatcacagccccaggggcggggcgttgctgtcctccctgcagagcacacccggcctgccctgagtgaccacaggtgtccccgtcgtgctcacctgcaccggctgcgaggagcagggagctcctcaaagagctcaggaacggacaggacatggtgagtgcagggcaggagccgagccggagccggagccctgggaggggagggttggaagcggccagaacacgctgaaactcccgggggagccgcccggaacccccatgcagcctctgtccctgtgtcacccccgggtcctgcggggagtttcctcccctgccccagtcttcattccctggaaagtcgtagttgtcaggacgctgggatggaggggaaaaaaaggcagaaatgactcctgccctgtggggtctcgcgaagttaattggaagaaaaactaacccaaagtacaaaaaacaaaacaaaaaaaaaaaaaacctcaccccagcgaggcggtgcaacagccccaaagcagaatgcgctttggatgcagactttgggcccaggcccacgtccctgggaggggcgaggggtggacaggtggtgcgggcgctccacgtggcggcacgggctggcctgaccccaaaggcccgcaggccggactccagcccagccgcccctgcctgggcctctctccttctaaagat

SEQ ID NO: 13702 - DNA, 2966 bp, Homo sapiens
aatatcagtggcctagggaggacaggaaagtcggagtgacctttcctggatgcaggcaataacgggtggggggcctacagaatttaaagataaaataaaactgatgagaagtcagtctgcttttatgatcactgtgcaatggcagatctaaataatttcagtggtaaaatactttgtcctgaaaataccctttattgatctaagttctaacaattggtgcagtaactgttggggtttaataatgtatatgtaaagcttcaaatcagcacatttttattcttatcctttaataaacatattctacatggaagtcaacttgacttggagaactttaagaatcctatagttgcccccagagcatgtggtctcaggaacacacatcagttgagagtaagctcctcacaactctggaatcttccaagcttgctttgaatgcattcctgtctccaccgtccagcattcatatttctgcatttatttttattattattttgtgtgtgtgacagagtctctctctgtcgcccaggctggagtgcagcggcaagatgtcggttcactgccacctccacctcccgggttcaagcaattctcctgcctcagcctcctgagtacttgggactataggtgtgcacccaccacgtccggctaatttttgtatttttttttttagtagggacgggtttcaccatgttggccaggctggccttgaactcctgatctcaggtggttctcccactttggcctcccaaattacagacgtgagccaccggcccagctgtatttctgtgtttaaacagtagagtgaaatcaactatgaacgcagaatgatgggaaagatgacgataagggtatttcaattttgtcattttacgaaactacttggagttttgatttgtatttacagtttttaaaagagtaaaacagtgtgaactgtgaatggtaatgattttgtttggtaagtgcaaattttaattcatacatgaaaaatatttgttttgtttcatgattattactgaaaataattttgtactatgaaggaagaggggtgttaaaaatgatccactgtggatgtaaattattctaggcatgcttctgactaaaacattagcatttccacaagaatcccaaaaaataaaacaaaatttaaaagatcccttctgtttcttttcctccaagtttccagacccccatctccaccctggccacctcttcctgccataaataatcaaatcccacactttcatcttcaccttccgtttccattgcctcttccgatgggacagcacccgtggggaatctcctccatgctcacaatccccgtcttgccactatatcaagtcacacttcttcctcaccaatcgcccattctggaacctctgctatccagctagatcactttgaggtttggacaactactggtggaggtaatgggggccccagacagcccttgacatcacctcttttatctttgccaaattctacaaacaaagcccatgtctttctgtcccccgcccccatggctggcacatagtagatgtccccaaatcttggtgatgtgaacttgtgtgtctcacccttcacagacatcaccatttcccgttgcacagaaggctccactcataccaggcgctttggctcccagaataagcaggctatcatgctatgtccgacatctaggcgttggtacgtactgttcccttggcctggaacattctgccctctctcaccctctcttttcttggctttctgaaatggcacctccatcagaaagtgtccctcactcttggtctgagcaagggaccttgcctggtattcctgaacttccacctgttttccctctgttttctccctctctgggccttgtcctcaggtcagtgttgtgcctccagctcctgcagaggcgaactcagaggcggccgaatgaaaccaaatggatttggcttgaccccatcatctagcggtgcccagcaagcgctggcacatagtaggtccagcctgcccggactcgcccaccacgggcccccttccagagccgggaggcaggccaagggaggccccttattgccaagagcaaacaggccgcccagggaagttttgctctgggtcacacccacctctgggtggctgccaatctgcctgccagaaaccgcaggctgggccgcggctacccagagtcagggccacggagcttaggagaccttgggtcagctctgcaaaggggttgtttactgaatgcttctggtatctgcagccccgctggggttcggacagggggtctggaatagggcttcacaactacagcagggctaggaccctcttgggctggaaggagctggagaggcctctgcaagctgtcacaggctcttggtgctggcactggctcaggctttcacacacacacacgcgcacacacacacacacacacacacggacaggcacccccttggtggccttcacagtttcaccttcaggtaaatgggctcatcctttgagccatgaggatgggaagcgaagcaaggaatgaaaaagctagtgtgtttgtgtgtgtgtgtgtgtgtgtgtgtgtgtgtgagcgcgcgcgcgcgcgcgcgtgtgtactcgtgcgtgtgcctgtgtgtgcctgggagtgacctcacagctgccggaacataaagactcacaggtccgcctcccaggctcaaagctggctctgcaggggacatgagaggcacaccgaagacccacctcctggccttctccctcctctgcctcctctcaaaggtaaggaggcccgggccctggaatgcactgctgactatttgggtgtggagggggtggggatgtaaaatcgcagccaaggacccccttggcagaattcctccagggccccacattgggcacagtctggcccccatgcctaagcagggcttctctccctggaactcagagctgcctccggccagccctgctgtgtgacctcagatatg

SEQ ID NO: 13703 - DNA, 2798 bp, Homo sapiens
tcagttgcatacattcatcttgcttttattgtacacaaacagtaccacactctgtactttctcatttgtacttagctaggagattttacttcagttgaatcactttacttttagagatttttctctataagaaaatcagagttgctctttcttgttgatagctgtctatcttccagtggaaggatgccccaggatttatgtatccagcacctagagatgggcatttaggttacttgcagtatggcttccagatagggattggttcgcgtattttttcacataagtttaaaatgatctctcacgtctgtctcatcatctgtaggataaacagctgagggtggcattgttagcacagaccattctacctccagcttcagaatttcagggtagttattattttcacctgcccttacaccttccctgaagggagcagcagggatcatttccttgaatgtaagaatgactgtcacttgaggtgattcagcaatgctctactgttttagagtgttttagccagattacagagaaaggcatttacttagggcttgcttacagtaaacaggactgtatgggcatcagaaatgtgaattcttgttcaggatccaccgttatagcctctgtgactttgacctggcaatagccttccttctctggcctcagtgttctcctctataaagcaaggggctggacaagccatctccagtttcccagtttggcaacaccactcctaaaggatctgaagggacaacaggaggcccaggcctggaggtagggtagccctgagcctgtgcctagaatgggaggcaaagatggtggcaggtgggtgggaaaatgtggggtttgggggtcacaggagagaccaaggggcaggcctggagcatggcacgctccctgatcacagctctccactggaaggccatggagggagtgatggggagagcctgcaactcctggagataagcctgattctgactttctttgaaggatttttttctttcgacttctttcctgtgaaagagaatatccgagaaatgagaattttaactaaagagaaaacctttgcatttgctactgataaatatctggcctatgcgggaaagtcatgggtgccctgggattctggctccactgctaacaagaccttgttagaccttcttaactgcccctccagagaggagaaaggctcttggaggtagagtgagattggggagcttggcagagccctaggatgaactgtgtttttgttttgttttgttgcaggttggagcctttttcctgcagaaagagaagcaattccgggcttttccacagataacctgctagggctcgcagagacctggattctaaccccatctcgcctttcctcacctggggcattgttttctgcgtttgagaactgctgggtgggctggtgttacccaggatttttaaatttttgcaggagacgctttgcaggagatctctagggcttttttctgtgtcaattaaagagcctggccagctggacctgggctgtctttttgacaaaaacaaacgtcatccccctcccagctgagcacttgttagaactggactttaactgagggcctgaaccccctaacaacgggacaaacagtatgaaatcaaaaccgtttaccctcctcccaccagcggtttgcgtagggccttgggtgcactagcaaaacaaacttattttgaacactcagctcctagcgtgcggcgctgccaatcattaacctcctggtgcaagtggcgcggcctgtgccctttataaggtgcgcgctgtgtccagcgagcatcggccaccgccatcccatccagcgagcatctgccgccgcgccgccgccaccctcccagagagcactggccaccgctccaccatcacttgcccagagtttgggccaccgcccgccgccaccagcccagagagcatcggcccctgtctgctgctcgcgcctggagatgtcagaggtccccgttgctcgcgtctggctggtactgctcctgctgactgtccaggtcggcgtgacagccggcgctccgtggcagtgcgcgccctgctccgccgagaagctcgcgctctgcccgccggtgtccgcctcgtgctcggaggtcacccggtccgccggctgcggctgttgcccgatgtgcgccctgcctctgggcgccgcgtgcggcgtggcgactgcacgctgcgcccggggactcagttgccgcgcgctgccgggggagcagcaacctctgcacgccctcacccgcggccaaggcgcctgcgtgcaggagtctgacgcctccgctccccatgctgcaggtaccacagtcccgcccctgctccagcacctcctgccgcccgcccccgcccggcacctcccgcccccactcccctaactactgggtggggctgcagccgggcaggggcttgtccacaactagagcttgaaaccagagcacgtagttggggaaggagcttgggtcacccagtggagcccgctcattgcacggtcttggcaggacgtgctctgggagaagaaggaagatgttccagggcacacatagcttagtggagactcaaggaggaagctcccacttggccctcgtagcccagagatctttagagacccagacagcaagagtagagggaggcggtggggctgcctccgcagttgggatgccaccctgggtcccccaccagtctccttgccagcacgtgggcagccccagtggctggagcatccgggaaggcctaagaagggaatccctcctgctggcctccccaggaggtgtttggaatgtccttt

SEQ ID NO: 13704 - DNA, 2793 bp, Homo sapiens
cccttgagcctcagtgttcttatctctaaaatggggcaaagtcaccctgccttacacttgagacagtggctcagccccagtcttgagatgcagaggcactgggtaggtgttccctccccttatccacagtgtctgggctgggtgctggcatgggggcgcacacaaggaggggacagtaagagcagcttcacaagaagctgaagcctatctcctttggtgctcctgtccagataacatggagcccatgggcccctcgatgccaggacagtccatcagagtctgggagatgaggctcctcttgtcccaggaatctgctcctacctgggctgaacattcctgtagctatttctcagggtttgtgggccccatgcccatggccctgggtgtgcctagcttagtgccacagtaaacactcactccatccaccatggcccagaggggagatgaagcccagtaggacctgacctgtggccatctgccccccaggagtggcctgcagtgccatcctcatgtacatattctgcactgattgctggctcatcgctgtgctctacttcacttggctggtgtttgactggaacacacccaagaaaggtaagtgcaaggcctcccttgccccacctctcattctagggatgctcttccccctgcacaagctgaagggcctcatcctgagtgctgtttcttttaacacccactttgtgaaaagcactggactagtccttttggggggaggttaaaagcccctcaaagggcactgttctggtcctgacaagagttcacactcagtcgagggtttgcataacatgaaggaatgaatgtggaaaggggcctgatgggaagggggcatggtgcatggggtgatggtcacctgcttgggtttcacactggccctgtcttgtctgccttgcccaaatgtacccccacccccaccaactctgtattttattccctggaaggtggcaggaggtcacagtgggtccgaaactgggctgtgtggcgctactttcgagactactttcccatccaggtaaagtgctgtgagtgttgttttgggagggtgggaatggatgggaaatctgaactcaggccttaacccacccacagggaagcaagtttagaccaagttggtctcttcatttcctttctactgtgtcactggctgtgctggggaccccactgctcttctgagtatccatcttctttgggccagccctgaggtcctgacagggaaatggtggctcagtttggctttcagtctcagctctgtctggcccctgcctggtctgcaagctgggctggtgaggcacagccatctggccctgatgcatgtgggcaatcctggtgaattgaggataactctggcaggatcctgaaggttttccccacaggggaaagacctgtctggccagctcactccacaccccagctccagcacaccctagctgctgagtaccctgcagaaggtaggggtgctgaagagtggaggcagcacgtgaatgtgaaagagttctgtgcagggtgcagggtggtgtatatttgctgttgtgagtcagtgactgagatcctggtgtgttgcctgggggcagtggctgggtaaccctgcatccttcactgcattcggtattttgggggtggcagggccagctccttctgctcatccttagcctaagcccagtcttcccgggaccttcctgctcctcagggtcagcgttccttctccttttcctgaccccatctctctaactgcagaaaatttgaagctgtttttgttgggagaaagttgcatcataggacccaaccctctaattttggaggtaaagaaactgagcctcagagatgggcaggacttgtccaggctgcatagtctagtatgatggcaacattgcaaccaccatccaggcttattgaattcagggcccaggttcttttccactgatttcctactgcctgtttctctgggagagattcaatccctggatttccccattggattgattccagcttcctgggtctccctctcccccgttgctgctggagatctcagtttaagttcctgccctgtcactccatttattaacctgccaccattgctccctgtccagtgcagggctgtgctgggcatggggacacaagtcagccctgcccttggggtgtctattgcatcctgatagactttgtcactttctgccatggggccatgggcagactttctcaagcctgctgagcctcatctgcaaaatggagctgtctgtatgatgaaaagtaatcagttctgattgggtgggagtgatgatagactgttctttctgctttctctctcacctcaggggccaggctccagtgttctctgttgccactgtggcctggtcctctggaagtctccaggaggccagtagccccatccacttagaacaggatgacctgatgattgttggtcagacctgggacaggcaggtgtcctttgctatctgatctccacccttccaaaagaaccaaacaaacccctgtgtccttctcacatctctgttccaagaagtcagctgggagttggagccttagggcacatacaacctggccctgtgagggctccctggggcactaggacaaaagccaaactgggcccgaggcaggctggggtgttgagcctcaacccggggcttaggctgatcaacccggggcttaggctgagcctgcctctctccctctgggcctcaatctccccttcacttggccttggtgatctgacatcaggtctgacactctatgggggtgtgtgtgaccctcctgtcc

SEQ ID NO: 13705 - DNA, 2777 bp, Homo sapiens
ttttcaaatccggagaccaaatattatctttgaaaaaaaatggatttttgcctaatttggtagtcaccaaatagcatctcattgttcttttaattatctgcttccttttagtagagatccctaaaaagatctgaaaggagtcttcagataaaggaaggagctttcttttgtctgtctacaatcaacaaatatttattatgcaaaccattttgctccgagttttctcctctttccctttttggacagatttgggagatctcacctttcaggttttagacatcgtgcagggaggagttttgaggtagggtgcagcttacggtccaggataaaacatactgattctgccactaccaggctttgtgaaaagcaagtcatgaaaacgctctgaaattctagaccttcagtagataggatctaccgtgtctataaaaatatgaagatccttaagttttattaaagattcgaaaaaagtaaaagtgtttttacggttttattttcatttttatttcttaccgttatcgtttattataaaggatattataaaggatacagatgaagagatacgtaatgcaaggcctgtgagaaggggcgtggagcttccgaaacctcttccagccaccaccctccaagaacctggagtttctttttttttttttaattctacaaatgtaatattagaattgattttatctggccattagtgtgtgtcctaactcgttcgtttctgagagtcccatctcccggcccggatatcatctttcctgtgtcagtgaaagtgcagagtagatgagaacctttaaccaccaacattagggaggggtcccagacaaagggggaaagtcatgctctgtagagaaaaggttccctgcctccgaactacctctggaacactccagactgaaatgtttcctcttttgatatagaaaagagggatcgtgtgtagagtgcagtctgggcaatccctctcctcgggaccatttcggggtgggggcctctggggtccgtgtcgcgacgcacgcgcctcggtcccagctatctccgcagcggccaccccgcctgcggacgcagtttctcggccccgccccacactcgctcccccgccccacccagtctccgcgccggagggaagtggcgcgagggggaaagcactgtctgcgcgcccactgcaaacctcagccagtctgagatcgctttaaacgtctgacccccacccccactccgccccgcccagttcttcaacctaatttctgattcgtgccaaagcttgtcctctgctcaaaatcgtggaagacgccgagtatggggaccgaagacctgggttcaagcccggcttggaatccctgcccatccctggcatttcatctctccgggcttatttgctggtttctccgaatgcgggccttgtctggttcacgctggatccccaacgcctagaacagtgcgtggcacgcagttcgtccttctataaatatcggactaaatgcatctctgtgatggtaatacccacacggtgttgtgagaatgaatgagtgattctgtgcaagttcctagtgatctgttacaaaaagtactggtcgctaaattactcttataataaagcatacttttaggataataaagcactattcgcgaattggttaccgctattatgaaattactgagcaatacatatctacatctgatcagtctccagaattatgccaaatcctaccttcttctgaaagtatctcctaattatctgcacctgaccctagtgatgctgtgaatgtgcaagtatagctacatcctccgaaggaaggatctttactccttttacctcctgaatgggctgcgtctgctgaaagcgcggggaatggcgttggaagcttggccctacttccagcattgccgcctactggttgggttactccagcaagtcactccccttccctgggcctcagtgtctctactgtagcattcccaggtctggaattccatccactttagcaaggatggacgcgccacagagagacgcgttcctagcccgcgcttcccacctgtcttcaggcgcatcccgcttccctcaaacttaggaaatgcctctgggaggtcctgtccggctccggactcactaccgaccacccgcaaacagcagggtcccctgggcttcccaagccgcgcacctctccgccccgcccctgcgccctccttcctcgcgtctgcccctctcccccaccccgccttctccctccccgccccagcggcgcatgcgccgcgctcggagcgtgtttttataaaagtccggccgcggccagaaacttcagtttgttggctgcggcagcaggtagcaaagtgacgccgagggcctgagtgctccagtagccaccgcatctggagaaccagcggttaccatggaggggatcagtgtaagtccagtttcaacctgctttgtcataaatgtacaaacgtttgaacttagagcgcagcccctctccgagcgggcagaagcggccaggacattggaggtacccgtactccaaaaaagggtcaccgaaaggagttttcttgaccatgcctatatagtgcgggtgggtggggggggagcaggattggaatctttttctctgtgagtcgaggagaaacgactggaaagagcgttccagtggctgcatgtgtctcccccttgagtcccgccgcgcgcggcggcttgcacgctgtttgcaaacgtaagaacattctgtgcacaagtgcagagaaggcgtgcgcgctgcctcgggactcagaccaccggtctcttc

SEQ ID NO: 13706 - DNA, 2767 bp, Homo sapiens
actgcattctagcttgggtgactgagagagatcttgtctctaaaaaaaaggagggagccagggccggtcatggagaccatcctggccaacatggtgaaaccctgtctccactgaaaatacaagaaagaaagtaaaaaaaaaaaaaaacccaaactagctgggcgtggtggcaggcgcctataatcccagctactcgggagggtgaggcaggagaatcgcttgaacccaggaggtggaggttgcagtgaaccgagatgaaggcactgcattccagcctgggggataagagtgaaacccatctcaaaaaaaaaaaaaaaaaaaggagccaggagcggtggctcacacctataatcccagcagcactttgggaggctggggcaggcggatcacttgagaccaggagttctagaccagcctggccaacatggtgaaaccctgtctctactaaaaatacagtaattatctgggtgtggtcccagctactcgggaggctgaggtgggagattagcttgaacctgggaggcagaggttgcagtgagccgagattacgctgctgcattccagcctgggcgacagagtgagactctgtctcaaaaaaaaaaaaaaaaaaaaaaacggaaaaaaaattgaatactgttttggggtcatggttaaagctgaagtttaccaacccctgatgggtcataagtgtcatgatttgtgtttacagagtatcagaactttgtttaaagttaccagctgataaaatatgaggacaggtttatggctaacagggtttcatcattgacagatagcaagtatcaggattagtcttttttcacaaagtatcagaacacagcaagctctgatggctaatcaggtgtcagaacctgggtttaagtccaaccctgccttggggcccacggcaccgcggtaaccaccaactactgtccactctcaggatactgtttactaagtatcgagtgacaggctgatggcaaagtatcgggtcatggatgtcacactgtgagttgggcactgtgacagcgtctctagatgccagctgtttacagtgacaggagactggctgtttacaggggatgagtcagccccacttccagatacccaagtccagatggcgggtaggattggcacctctccaggtgtttacagggtactgaggtcctggcaagctgggcttctctcctgcggccacctctagccagggtggggaatgagtcccctgaaggctgtgggacccatgatcctggttagattctccttctgcttgtccctggctgtgctgcctcaggcacattacttaacctttctgggcctctgccacctcatctgtaaaatgggcatgatggtgaagccaggttgccagataaaatataggctactcagctaaatgtgaagttcagatcaatattgaatttggttttactgtaagtatatcccatgcaacatttgggatatacttatactaaaaaaaaattattcattgatgctatggtttgaatggtcccccaaagttcatatgtttgaaacttaatcctcaaagcagtcctttcaaccttgtcaacctgtcggcgcggcctctggtgcagtggcggcggctcctgttcctgccgcagctctctccccttcttacctccccaccagatcccggagatcgcccgccatggctttacttactgcggccgcccggctcttgggaaccaagaatgcatcttgtcttgttcttgcagcccagcatgccagtgcttcctccatgaatttgaaagacatattggctgacctcatacctaaggagcaggccagaattaagaccttcaggcagcaacatggcaagaaggtggtgggccaaatcactgtggacatgatgtatggtggcatgagaggcatgaagggattggtctatgaaacatcagttcttgatcctgatgagggcatccgtttctgaggctttagtatccctgaatgccagaaactgctacccaaggctaagggtggggaagaacccctgcctgagggcttattttggctgctggtaactggatgtatcccaacagaggaacaggtatcttggctctcaaaagagtgggcaaagagggcagctctgccttcccatgtggtcaccatgctggacaactttcccaccaatctacaccccatgtctcagctcagtgcagctgttacagccctcaacagtgaaagtaactttgcccaagcatatgcacggggtatcagccgaacccaagtactgggagttgatttatgaagactctgtggatctaatcacaaagctaccttgtgtcgcagcaaagatctaccgaaatctctatggagaaggcagtggtattggggccattgactctaacctggactggtctcacagtttcaccaacatgttaggctatactgatcatcagttccctgagctcatgcacctgtacctcactatccacagtgaccatgagggcggcaatgtaagtgcccataccagccacttggtgggcagtggcctttcagacccttacctgtcctttgcagcagccatgaacgggctggcagggcctctccatggactggcaaatcaggaagtgcttgtctggctaacacagctgcagaaggaagttggcaaagatgtgtcagatgagaagttatgagactacatctggaacacactcaactcaggacgggctgttccaggctatggccatgcagtactaaggaagactgatccacgatatacctgtcagcgagagtttgctctgaaacacct

SEQ ID NO: 13707 - DNA, 2756 bp, Homo sapiens
tgtgctaatatgtctgcccctttctggcagtgtaaaaactgtcagagcctctcttaggtagaaaaggcggcagcaattaccgtctcctacggagaaaatgccccttttccagcactgggcccaacatggatgcccttggggcgagggcaggatgcccttggctcgattttgcttataggtagattttcaccaagatggacgcaggagactcgcctgtcacctgctggagaaatcacagcatgcaaatcactttgtgccttctgcctttttattaggttaatacagacattggtaggttttatatttacagctaggcctggatgcctgcctgtgaccttttgaagggtacacactgtttgtttgttcatttgtttgtttttccaaaaaaacctctgtattacttttttttaaaagaagaaaaattgcgtgaaagggagatgcctctgaagcctctcagctcccctcacagtgccaccccagatagttggtgtgacttatctagccttttttttggctagtggggagcccctggtggcctgtgtctgagtgagccactgcataggcccctctagtcctgagtgctccactctctcccagtgacctcacggcagtaactagggagattttatcaactaacatctcagagcaaaaagggaaaattcctcacttttcttaggatatcgtgtgggcagaatagaaaggctgtctgtttctgagcttaatcggcgtacttgcaaaatgacttgtttttccgttgctcttatttgtattttaaactgtagcctcaattatgtaccctcttatgttgttagaattaggcatctggagtccagggaatgagtatagagatgtttcagttgttcgaaggggcacatgtaggtaaggtaagagcaccaagatgaggtgggggtggggggcagcaagaggaaacttgaatcagggctacgatagctgccttgctgactgttacaccaactcttgcacctcttaggagcattcactggaaaaattttccagatctcttgacgtcacagcgttgccatttgcctactgctgcttggatacagaatgcagcacttaacccttgtcctgcggggagggagtgattgagttgggtgctgtagttctggattacacaaccttttctttcttccttatctttacttctgtctttgcttttttccttgttatttgcttttgatagaggagaaaaaggattatgattaagcattttgctgtggttttgtgtgttttgcttgttttaacagctctgtagcctgatttcctttaactgtttagtgcctgataggaaagttgggcttttaaatgtatggacagggcaacaaggctaattcctgcagttgtgtacccactccctccctggccccctcctaccacatatacttcttttcaataatactgtttttcagtggcttttctccaagtaccctggcatttttaatgcatgagatctggacctttttagcagtaacctaaggctcctttgtgcagtcgtgcttctgactcgataaccttacagttcacttgttccctgttttgcattcacattgagtcgtttggctggcacaggactgccaggcaatgcctagtacagcctgttactatgcagctaatcagggagataatccttgtaaaccagtaactgatagccaccctcattcccatctatgtgttgagtctttttttttttttttttttgcttttgcagctatttcagcctccatcctgttgtcttgttaactatgggaaaaagaaaatgcagcccagcaagtcagtcattattcttgttccagttccagaagatggaattaaaatgtgctggtcattttcactatagaattttctttttttccccttgtcttgtcctccgaggggaaagagtgtgctttgttgataatacaaaccaaagggagagtgatagtaaaaaaaacaggaggatatcatcactgggtttctcaggattcattgctctgccatagcaaaataaccctcaggcatctgagcatttggagaaacagcagagcttggattgtagtatttaaatgtcaagggatatgcaagcaaagaaaacataggtctctaagggagtatactgtcatattttaaattcattgcataagcatccaaacatagctctagattttattggtgatcttcatgattttttttataattttgagaataaaaaatatggatactttttttaaaatttagggaataaaaaaatataaggatcctagttctagctgaacattcctcctacccttaaccacctcccatacacactgcaagtggagggctgcccagcttctcgattttcaccctgtgtcagtggggtgaggtgcactcttgacgttggacaaggaagaaatcatgggaccgggggaaccaggaaggaagcttgttcatccgtgggaagattaaactttcattctgagcatatgactgcatcacagctttttgtttctgttcttcttgcagttaagatccttctattctacgtaatattttatggctgcctggctggcatcttcatcggaaccatccaagtgatgctgctcaccatcagtgaatttaagcccacatatcaggaccgagtggccccgccaggtaaaatccacatgaatagcttcatttccttcagagatagcatgggtgtcactttttctattgagaaaaaattctttggaaaattactctataatgtagtcttaaagcaaccatgaaaagggaaa

SEQ ID NO: 13708 - DNA, 2743 bp, Homo sapiens
tgtcatagtgctgatgggagtgtcttttagcatgctaatgcattataattaacgtaaaatgagcagtgagtttgaccataggtcacttccatcaacatcttgcatttggttggtgttggccagcttctttaccacttcctgttttatcagcagggtctttttgactggtttcttgtgataccagtcctgctgacctcccccctcatcctgtgactgagaatgcctaacctcctgggaatgcagcccagtaggtctcagcctcattttacccagccgctattcaagatggagtcactatggttcaaatgcctctgacagaatcaccttctaaaagtcctatgtccaaatgcagtcacttagtgggtacgaatttggcgggggacacaactgagtccatagcaaacagtattcgatttttaatcacatcagcacacacaataagactctgaaaagtgagtcccttggctgggctagggagaaaattgtgacaatatgtagtgttccaaaatgaccctcctccctgcatcagggaggggagcactcagaaccttccagcttggtgaacagaatttgttctcaggccaggagccatgctctgtaagtatgttgtctttacatctggcccagtttgatctttggagatagacacatagtgggtcccagattgtgtcctgttgcaaagatctggaaacacaggcttgggatacctgtatatcaacagaaaccagactagcaggtggtaaggctggcattgttctgtgttcttaggttttttttttgtttttttttttgagacggagtcttgcgctgttgcccaagctggagtcgtgtggcgcgatctcggctcactgcaagctccgcctcccgggttcacgccattctcctgcctcagcctcctgagtagctgggactacaggtgcccgccaccacgcctggctaatttttttttttttttttttttttgtatttttagtagagacgtggtttcaccgtgttagccaggatggtctcgatctcctgacctcatgatctacccgcctcggcctcccaaagtgctgggattacaggcgtgagccatggcgcctcttaggttcttaatcactgggacacccacaggcaaggcctggctttttccacaagaagtattctggatggaagtaaacacatcagtgacctgaaagttctacatgattacaatgacttaagcttgagaatttttttaaaaacagagaagggagtagtaaatgactaaatataaagcacctagtgctgtgtttcgcaaatggcaatcactcggcaggtgtctcagctcctcgctgcagcaaccaggcttccaggactggaaggaagtcttctacattcaaaactagactcaaactactcccctccaccacccagttctactcctgcgctcgcgatcctcctgcctggcaaactccatggcccgacagattcactaccactccactgccggaccaggcacgtccgtgggccatccacgcctggaaaacggctggctgggccggaggggcgaggcccgcaggcgaggggggcgggtacaagccacttcttgggagccgcggtacgcgcagccttgtgggagttgtagtttccgcagctctgagtctccaggcgaggtgtcaccacaggactcgttttcccgtgctcctgtgcgcgggtccacttgggacgggtccctgagtaggtgaggaggtgggtaggagcttgcttatagaaaagtggaatcgagtagtccttgctggtggagccgctgccgccagggaactcagggccggctcctgttccttcaagagtgctggaggccaaacttgaaatacaagtttaatgttcctcgtcgggcaaaagataaggatccgatctcccccggcccggtgtgcagcaggagcgaccaaccccgacccgggttaaaactcccagggactcttcgctgctgccacctcttgttctctcccccgttcccactcggggtctccctcagggccgggaggcacagcggtccctgcttgctgaagggctggatgtacgcatccgcaggttcccgcggacttgggggcgcccgctgagccccggcgcccgcagaagacttgtgtttgcctcctgcagcctcaacccggagggcagcgagggcctaccaccatgatcactggtgtgttcagcatgcgcttgtggaccccagtgggcgtcctgacctcgctggcgtactgcctgcaccagcggcgggtggccctggccgagctgcaggaggccgatggccagtgtccggtcgaccgcagcctgctgaagttgaaaatggtgcaggtcgtgtttcgacacggggctcggagtcctctcaagccgctcccgctggaggagcaggtgagaggtcggcccgggctggggctggtggggcgaggaccgtgtgccaggccaggagtctcgccctgacacacatcttcagagctttactcgcgcggagcggggctcgggttgggtccagaagaagggaaaacagcagtagccagtgactccccaggctcttgagcaaaggacctgctggggttaggacagccccggaacttccagttttgccctgatggcgcagccatcagtaagcgctgcttaagacgcatgggagtcgcctggggatcctgctacgttgcagattctgattcagcaggtgtggagtagtgccccaggtcagcatttctattaagggtctaggtgaacttgaatacaagggtgc

SEQ ID NO: 13709 - DNA, 2718 bp, Homo sapiens
gttcttgtttatggaccacaggcaccccttgaacctcccctcctgttgcttctctcatatagacttcccggtttccctcgtcaactgcagctcacatttaactgttaactgtgggcttcgggccagtcaatagctgacctgtaggcactcctggccatccccatagggcagtgccctgccagcctgactttggtcttgaaacacaggccaagcatcctcttcacttttcgaggccttaggcccagctaagccagacagagtgggatgatcctttatcaagggaaatccagtgatctcacagtgaagcccacaccaaaggccatcattttaaatattttccttcttccaaagtttatttggaaaaagcactctgaggaaaagctcatttccttaaaatatcaaggaaccaaaaaccaaaagatgatatatttttctggagacacactgcaaagtgtataaataaaattctgtaaagtgcacaaataaatattacaaagaattcatttctgctacagttgtctaccatcttcaatattacatttagctaacttaattttccatggatcaaattattcaaagttaaatttctcttaataggtcatctgagtaaacaatttcaagtgttacttgccaaaagaaaaaaaaaaaaatgtttccaggcttcagatgaagtcggcagtgtcaggctaagaaaacaaccttaaaaattcacagagagctggaacaattgcaaagaaaagttggagcccggaggtcagtcagtcttgttcatgcagttctgaaggtagaaaaaaaaaaaaaaatcacaaatttctaccaaaactaggtcttcaaggggcaaaggaaaaatgcctttttttttttttttttttttttttgagacagggtctcattctgtcacccaggctggagtgcagtggagtgatctcagctcactgcaacctccatctcccaggctcagttgatccttccacctcagccccccaagtagctgggaccacagactcacaccaccacgactggctaacttttgtacattttatagagatggggtttcaccatgttgcccaggctggtcccgaactcctggcctcaagtaatccacccgccttgggctcccaaagtgctgggattataggcgtgagtcaccgcgcccagtgccatttttttgaaagcagaaaatgtataaagtaatatatccttaaagtagcagctgtcatcagaagacagcaccctgggctttctctggcaccaaaactgggcactctgtgctcctggttttcagacagagagaaagggagaaggcagggcagagggaaggggaggaggggagagggagtagaggaaggcttgaggtatggcatggaattctgcaaacacagcagttattaagggaaatgggagagtgtcaaggggaagaagttttcttgaatttctattcttgaaatttcttggaataaatggatgtgtgcaagggaagggataaatgtagttgaagatctattttgtaggtgaggaaatggtaatctgagaggcaaaccagaatcatgccccaacagggaatataaccagaatagaggtaactctgtctccagtctctgaatctacaggcttcctctaatagcatctaaagccagggcttctgacagcacagtctgagaagccccatgacatcacaagtggcagctgggtgtactttatgacaaatgccaaattaactcctgcctgtgaccttgccaccataactcagacagccaggacacacactgcaccccaaacactcaagtccctgtgtaaatcttcactcctccaagcacagagggaagcctgctccgtaggctctgttaagtgtactgctgccgctgacatcatcataaataggaagggagagagtccaggaaccacagggctcacttcctagcctctctatttaagattttcgagggcagatggcactatatttaaccagcacaagtagtattcattgtgcccagggcctcttaaggaaaactgaacaaagttttagaatgaacctgccctcacctcactcctgctcaaccatttcacccaacaacaagttagaggcagagaagatgaatattattaaaatgatgcttctaaatcaggaccttatgggtgctttggctctcaacttttttcataaaatatctgtccagtccagaccgaggagccagcttcgacagcattctggtaagggcatggaggtaaccagggctcacatgtgtctgtggcaatgttctgatcctgttgttagaaatagtcaatgcagcagagatgatggcattcattgccaagcctgaggtcttcagggcttgcctacatgggaagatggtactgaagcctcctgtctagatgacggtctgtttagacctgagctacctgcggtgtggcctgctgacagactcgctctgcagggagtagctggagaatgttgctctaggaatcttgcactgtgccccacccgtaatgatgccccaggacagagggtgggaaattcacgaatacactcctactacagtgccatcaaacccagggcactaagctgtccacactttattagtaattctcacagcaatcatgaaagatcagaatgatgatgtcaacttctagagaagcacacagagactctgagaacctggctatttggccaaagtccacagcttcaggtcagtgtgactctaagacccggggtagaga

SEQ ID NO: 13710 - DNA, 2710 bp, Homo sapiens
gaaataacctggaaaatccctgcggcaacacgtgtgaagaagtgcagctttctgagtcacaatctatttgtaggaatttatcccaaggtgagggggaccagatacctgtacaaagatctgtggaaacaagatcgtctatcacagtgatatatgctagtgagacaccaggagaaaccaaaatatcccaaagcaggtgacagatccatgacacggagtccagcgcagaccatcagggtgtggagacggacttttggctattgatgagtgtgaagtcacgggccgcctgcagaacgcagtatgtgacgtgaatcccttaaaatatgtatttaggctgggcacggtggctcatacctgtgatctcaacattttgggaggccgagctgggagggttgtttgagcccaggagtttgagaccagcttgagcaacatagcgagatcccatctctacataaaagtttcaaaattagccaggtgtgatggcacgtacctgtagtctcagctactcaggaggctgagggaggaggattgctggagtctaggaggtcgaggctacagtgactcgcgtttataccagtgcattctagcttgggcaatagagcaagatcctgtctcaaaaaaaactttttaaaaatacatttcaatgtggaggagaaggcgatcagaaggatgtctgacaagaaggtgagagaggttacctctacacagttggcttatggggtcttctttttgtttttatttttcataattttccaaattttgcacaccggacacctagtgttgtgttgtttttctctctctctcttttttttttgaaacaaagtcttgctttgtcacccaggctggagtgcagtggcataatctcggctcactgcaacctccgcctcccgggttcaagtgattctcctgcttcagcctcccgagtagctgggactataggcaccagccaccacgcccagctaatttttttatttttaatagagacggggtttgaccatactggccaggccggtcttgaactcctgaccttgtgatctgtctgcctcagcctcccaaagtgctgggattacaggcatgagccaccacgcccagccgtgttatttcttaaggcttaaaaaaattctttgaggctgggtgtggtggctcacgcctgtactcccagcactttgagaggctgaggcgggtgtatcatgaggtcaagagtttgataccagcctggccaagaaggtgaaaccccatctctattaaaaatacaaaaattagctggacacaatgatgggtacctataatccccactactcaggcggctgaggcagaagaatgacttgaaccccggaggtggaggttgcagtgagcccagattgcaccattacactccagcctgggcgacagagcgagactccatctaaaaaaaaaaaaaaattctttgcactggtgtgggacgatggtgacgaatccctcagccatctgtggggcgctgctgagggcgtggggggcatttctgcacggtgaagcagagctggtgggaggctgcccgagggaagctggtgctgggagggtttgcagagaggaaaagggcagtttatggaaaaggcctctgggctctgtctggagccgtcatgccggccttcacggcatccttccgcacttagagtcctttccatctcctggtggctggcacagggccagggctgcactcacagctggccagggtagggcagggcgcccgtcctcagggccactgactgtagggctaacctaggggcctggttcacccctctcacctggggcttcgctgataagcctggttcacctcctcacctggtggcctcgttcaccccctcacctggcgccttgcctgatagcctggttcacccctctcacctggggcctctcctggtggcctggttccccttcctcacctcgtggcgctggttcacccctctcacctggggccttaactggtggcctggttcacctcttcacctggcgccttgcagagtagccgggtttactcctctcacctggggaggcacgaactggcccgggctgactgacctccctcacctgtttggctttaggctctggggcccccctgcccgggtgtttctgggaggctggagggtcccacgtgagctccaccgcgggcagctggagggagtggggcaggacgctgagcgccgggaggggtgtggccctcctgtcctgcccgcggccccacaccggccccagtcccgcccgcctcggtccctgccccgcgcgccgacgtcaccgggacctcccgatcctcccggcccaggccgagctgcccacgctgctgcccggggctcggtgcccggcgcggcctctgccggctccggcgggcgcgggactgcgaggtaggggggcgcgcggggaagactcgggggcgcagggaccgagagggacctccgtgccggggcgggtgggtaggggcagctccgggtccagcccggcccgcgcaccaagtcccgagggcgcccgggcggcggcggctacgggcgcgcggggaccgcggagacgcgaagggcgcacttggcgagggtttggtgcagcgccgcgccggggtccgcacagccccggcaggtcctgcagagggaaggccgggccagggaagggccacgcgccccctccccgccatcctctcccaggccagggcgacctgcgcgcttcccgatgggagcaaactggggac

SEQ ID NO: 13711 - DNA, 2705 bp, Homo sapiens
aggagccaactgaggtttgaaatctgaccaggccaccctgccctattcaaggcactggcttcatgtttatccaacctgtccaccagccaagctggggctgtgcatggctcaggacccaacttctatctaaacaagaaattaacctggcagccaaactttcgctgttattctctattccctgcccagaaagcccagcctggccgggcagagacagagggctgggaggagacagtcagggtgaccttgtccagacaactactcctcatgaccaccacctgagactggcaggcagccagcaggaggtcggtgcaggtcgtaccagcacggggggttctgagccactgctgggacagacagatctggggcagggaggagggcatctctctcccagagaccctggaggccagtttctaaatggccaacatgctccaaagaaactgataattcatagctttggccttggttagtcaggcctaatagtcatcaaaatccaacagcctgcagggttggctgaggttctaggcaaagccgtggagaactgacagcccttccccactcctctcctccacaccattcaatctgtcctggcattggggtggtccagtgtgcaagtggataggagtcagagaacagcagtactcgatagggagaggcccactgtgctggtcttggattttagacctttggcctgtgggcgctggggagccatagaaggttgtggagctaggttgaggatgtggtgagatccgttccagaaggatcactgccagtggccagctgtgggagggtaaatgactggtggatgagggctggtggcagtggtcataaacatgggccataactgcatgtggaagggaggaggtggttacaggagaatcagcaaggtcagaaccgattagatctgagggatgatggggagggagccattgagaacagcctagtgggcgattccttccttcattcagcagggatgtattgggcacctgctgggtgggagaaaagaggcactgaggacatttataatccggcaggtggggagaggcaagctgagctagaagacagagccaccgggagggtggtggcctcaaggcctggttgttaaggggaccctggacctattccaatctgaaggggacaagtgcttctgggaaaaggaacagccagggcggaggccctgtggctgcaggagtgagtttggaaagtgagagaggcagccagggggcggggttgttgggacaggtgggtccagtggaggcggcggggcggggaagcggtcagatggcctgggccagggggaactggaaggacgctggccttgcctgagagagtggaggcagaattggcatgctctgaaatgcacgtctgcatagcacgaccagttcttctcaccccagtttacagatggaaaaactgaggccgggagtggtgatgtcgctggtccaaaatcacacagctgcaaatggcagagctggcgccaggttccaggcagacagactcccaagccggagctgctgaggccaccaaacaaaacacgtcactagtcaaggggcaggcagccgggggggaatcccttcagcagggctctgcccaggcaccaggaacccagagcccgatgatggccgcctcctgccaccgtggggaatggatcccaaggcccgccccaccaccaccacccctgatcccccagagtcctagaacattcagggctgtgtcccagagtggtgctgttccaactcagctctcagcacgaggggaccgtaaatccaccaggcagggtacgtggcacagctgtgacacaggacaccagcactaggcccaggagggcacggcagtgctttgctggggccaactgccatgactcccacgttgggaggtgaaagatgggaactgcaggtgcacctgtttctccctgagaagctcaagcctttgacagtgttgagaatccggagctgggtcaaccctccctgaataaatgccattgtctttccttggaagatagcaccaaggaggtcttcatgcgtaacgtgtgaccaggtcctctccagccacagcagactgtttctgctcgtggaaggtgccttaagtaactgctcaccccccttcttgtctctgcaataggtctatgagatcttgaagagaacgacgtgtacaaaggccaagtacagcatgggtaagcacgtttttggggcttgagatcagcattggtttccaagtcggaatctcacctccgagtcatctctgtgggaggcaggcagccggcttggggtgtttaagagggttttgatttaagcctgtgtaacagttccagacaagagggctgggttgggagcgtgcagggcagttttatggcccagcacttttaaacacaaatgtatccttcactttggcctgaggggtttgtgagcgtgtggacaggctctccctgcacgggtggtaaatccaggctggaaacagaccagtgttagggatgaccgggggattcctggccctctcttgaccctcacggtccagtgggaagtaattggggttccagccggggcggcatctccatgtggctgttccggacccttaaaagcacagctgggcttgctgaaagcagcgccccctgaccaggcaccaccaggtacagacagcctaattccggaagctgccacaaaaccatcctgaccaggctttctgggtaccagtttccagaaccccttaag

SEQ ID NO: 13712 - DNA, 2687 bp, Homo sapiens
caccttctggagtcttctgcattctttatacatggttgagataaactatgagtcattagcacagctagaccttgaggtcctacaagaaaatttgcaaatcattcactctgttttgaacaaggtatatttaagatgatgttaaaatacccaatggtcttgggtcaaatacagtttatgactgtgtatctaaaatatatattgcaatattcttccctttttctactgacttcatgaatttagcggggatccattttataagctcaaagataattacttttcagactaagaatatttagggtaaaaagtactgttcaacatctctactgaggatgttatgatgtagcacactgtataagctggagctaaaggaaactttccttaaagtgctatttactaaaaattggaacacattccttaagacaaatcgaagtgtggcacacaacatccaaacttccatcatagatacagaggtgttaccatctcccactcccaaatttctttgtcacgctgaggatactcaagaggagcaggacatgttggtcgcagcaggagaaacttgaaagcattcacttttatggaactcataagggagagaatctcttatttagtatcgtccttgatacatttattattttaaaagataatgtagccaaatgtcttcctctgtgttaaatctttacaaaactgaaatcttaaaatggtgacaaaaattctacttctgatagaatctattcatttttccaattagatagggcataattcttaatttgcaaaacaaaacgtaatatgcttatgaggttccatcccaaagaacctgctattgagagtagcattcagaataacgggtggaaatgccaactccagagtttcagatcctaccggtaattggggtagggaggggctttgggcggggcctccctagaggaggaggcgttgttagaaagctgtctggccagtccacagctgtcactaatcggggtaagccttgttgtatttgtgcgtgtgggtggcattctcaatgagaactagcttcacttgtcatttgagtgaaatctacaacccgaggcggctagtgctcccgcactactgggatctgagatcttcggagatgactgtcgcccgcagtacggagccagcagaagtccgacccttcctgggaatgggctgtaccgagaggtccgactagccccagggttttagtgagggggcagtggaactcagcgagggactgagagcttcacagcatgcacgagtttgatgccagagaaaaagtcgggagataaaggagccgcgtgtcactaaattgccgtcgcagccgcagccactcaagtgccggacttgtgagtactctgcgtctccagtcctcggacagaagttggagaactctcttggagaactccccgagttaggagacgagatctcctaacaattactactttttcttgcgctccccacttgccgctcgctgggacaaacgacagccacagttcccctgacgacaggatggaggccaagggcaggagctgaccagcgccgccctcccccgcccccgacccaggaggtggagatccctccggtccagccacattcaacacccactttctcctccctctgcccctatattcccgaaaccccctcctccttcccttttccctcctcctggagacgggggaggagaaaaggggagtccagtcgtcatgactgagctgaaggcaaagggtccccgggctccccacgtggcgggcggcccgccctcccccgaggtcggatccccactgctgtgtcgcccagccgcaggtccgttcccggggagccagacctcggacaccttgcctgaagtttcggccatacctatctccctggacgggctactcttccctcggccctgccagggacaggacccctccgacgaaaagacgcaggaccagcagtcgctgtcggacgtggagggcgcatattccagagctgaagctacaaggggtgctggaggcagcagttctagtcccccagaaaaggacagcggactgctggacagtgtcttggacactctgttggcgccctcaggtcccgggcagagccaacccagccctcccgcctgcgaggtcaccagctcttggtgcctgtttggccccgaacttcccgaagatccaccggctgcccccgccacccagcgggtgttgtccccgctcatgagccggtccgggtgcaaggttggagacagctccgggacggcagctgcccataaagtgctgccccggggcctgtcaccagcccggcagctgctgctcccggcctctgagagccctcactggtccggggccccagtgaagccgtctccgcaggccgctgcggtggaggttgaggaggaggatggctctgagtccgaggagtctgcgggtccgcttctgaagggcaaacctcgggctctgggtggcgcggcggctggaggaggagccgcggctgtcccgccgggggcggcagcaggaggcgtcgccctggtccccaaggaagattcccgcttctcagcgcccagggtcgccctggtggagcaggacgcgccgatggcgcccgggcgctccccgctggccaccacggtgatggatttcatccacgtgcctatcctgcctctcaatcacgccttattggcagcccgcactcggcagctgctggaagacgaaagttacgac

SEQ ID NO: 13713 - DNA, 2685 bp, Homo sapiens
tctgactctgagcttggagaaggcttgctgctccaacatcacgtggacagaggcaaggaggcacgtgggattgggaatggggatagagaccagcctgccccaggagcaggtgggtccaccagaaatgctcatgcatttgctgaccaggacttccatcctgaggtgtgtgcagagtgatccaaagccccctcgtccgtgccgtgactctgggccctggagcccaccccctttctttagaaaagcctgttctgtaggcatctgtcctgagagcacccgatggcactgtaggatgctgagagcagctgaggcaggagggccggcggctgttccctcccagagtcccatctcaggtggacgccggtccacgacttccagcccaagggctaatgtgtcttctccagtccacgtggcaggtgttgccaggggagcgggcagtgcagctgttggacagcagggggtgtttcttcaacccaggctgccctccttctcctgtcacaacagggccccattcattctggaacctgcagaccaactccatccgcccatcctcacagtgtgccgagcgccaggtccagaagcacgcacctacctgggggcctcttcctcctttctggcgggggtccgctttggcccctgatgctaacctcgccccgtgtgccgtgcagctggagtcaaacggaggcgcagagacgccatggagggtgacaagccacacagcagggttcgaggcagccactccccactccccactcccgcggcatctgtgccccacccgggtgccaagccactgtgccatgcatccccccacccccaacctgctgcaggtgtgtgggcctttgcctcttttcccaggggaaccaaaaaccctgggatccagagggtcattgcccagatctctggagagcaactccaggggcctggtctccaggggagaagagggagtggggagaggcctttggccaggcatgtggccctcagtgtcctgagcaggtcgggcagctgataagtgtgtggctggcgtagctcctgcagagccaggctccctggaggagcgtgtggcctccttcccagctgtccgccctcctgccaagacatgcagggagcagccctgagacacgggtctcaggcaaagtgagtggcaggcagtgctgttccccggggacatggcggtgacctgctggtctatggccctgagatgctagggtgcccacctggagctgtaagctggcctggcagacctgggaaggccccatgggccccttttgaaagttcccttttcatgaattttacccagaatctcccctgcacactggcccctgctgctttttgctgtccccagacagtgccaacagagaccacgagtcgtctaaacaccagcccaggcactcagcactcagtgcagagtcctggcccaaggggcatgaggccagcattcctcactttaggaccaggaaacagttcccatgcctccgaaacagcggagacagctgccacttcctgtcgccccagctcagccgctgcctgtcactttccttccggggcctcagggcgttctcctgcgtttactcttctgaaaggcaggagaagggtggggtgtggagatacccagaggctgtccagctctcaggccactgcctggccctggctctcaccgtctcagcctcctagtggcctcctcggcacccaccagcctgcagccacctgtgcttggggttcttggcacctccccttcctgtgggctgagctcagatgggctctggtcgggagccggcccaggaggaaggccatgcgtctctgggtctcttctcgcccaagtgaggcctgtgtgcccgccttccgtgatgcagcctccggtagggacagacccacgtctctcaaagccttatgcccacgatgtgtttcccttgaattcccttccttggggctccagcttgcaccccactactaggtgactcctctcaagggctgggatggggcccacattgggcaacactgacaggctgtagcagacaggcctgggcaggctcagcagcagcaggggacctgccagtgccgttgggggagtagccacaggcgcccagaggaggtgctggcatgaaacaaggggtcagcctgtggtcggcgcccaggcccccgagggcccacctctcctctgctccaaaggccagcaggcggggcctgaaggatctggggtttcctgctggccctgcctcaccaggctgagtgatgggtggcaggactgcccagagccctggagcatgcaatgtccagtaccctcccctcttgtgcatctgcccagtgggggctccaggctccatgtgccagtgaggtggggaaggcagctggacatagcaggcccggagtgtccccctgtggagggaccgtgggaaccagatcacgtgggcctccctccccctgtaccccattgctctcctgttgtcacactcagtcccacaaaggcagccccggggccacggtgaccccccagggctgagctccaggagctcaggggtgggggtgtccattaggagactttagcaggtgagggttgacgcaggctggggagacacgggtgggcgtggcctgtgagcctcccaggcgtggggaccctggaaaggtgcacgcagcttctggagattcggggtggggggagtcaagtcacattcactgtcaccgtctgcacta

SEQ ID NO: 13714 - DNA, 2673 bp, Homo sapiens
gagggagcacagagaacacagatgggggaccacagacacaccccagcccttaccttcacccctggagccagcctgggagtgggaggccgggcctcagggcctggggcctccagtccatgttagaccctctacaagcatctcccctggcacactcaggtcccagccaccctcaggggagctggggaggaagggagtgttactaactcagtcatgtaaacaacccctaccagcctgccttgccacagaactggcctctgggggcaggccaggggcagggtgaatggatgccaacatggcccaagtccggcccagtgcccgctcctttagacccccgctccccaggacccccactcttctcaaccggtagaaggctctaggccttgctcatcccttaggaggaaggctcctggctattcagggctcccctctgcagggatggtggtgtgacttgggaccaagctagaggcatccagaacccatcgcttgcaagggatgggaaagagggagtgcagcttctgtcccaggcaggccaaggttggcttccgcagggaggcaggggagccgagggtgggaggtgggtgcctgaggggaagggaagcgcccgttgggcgtgtgggtttctgtgtgagtctgaatctgtctgtgtgtgtttgaatctgtctgtttgtgtctgcactggaaccacccccgcagcggagccgggatgcttcctcgggtggagggtgccctgcttttccatttcctctcctcctctctgcactctcccgggagccactcccatgggcgcctctccagcccctggcctggaagcaccaggaaccctggggatggggcagaccctcacagcccggggtctggagccggtgtcggagctcatctgggcccatgacctctccagacatttggcaaaatcaaggcccttagaccagggacagacccaagcccaggccctcccagaggtcctaggacgcaaccctttgtgcccttgggctctggaagaggtttgggaagggtttggggtggaagatggcaaagagcagcttggccaggtgaggatgaggcagggcagacacaggccagtggggcgtgccatgtgccacagatggagaggaccaggagccagtggcccggcaggcacagcccggttggcgtgggccagagcgcccatcactgacccgtgagaactcgactgcccctgccagctctggcactgccccctcccagccgccccgccctagcaccctggggggcaccccgcccaaccgtggcctggtccggcccctcccgccctttgctccagttcccgggcttggcacctatagtgggggtgccgcccgcctgccaggctccggggccgggcccacgggagggtggggcggctgggaagctggcacgctgccccgggggagcctctctcggcaggcgcccgggtgccgcgggggggagggggaacaaagggctcattctccccgtgcgcagccggtggcatcgccggggcgttggcggaagcccccggggcccgggagggggcaggcccaggcgcggccgccgaatcacgggctcctgtttcccgcagggtgctggaggaggaaaccggcggagcagcttccccactctcagttgcgcttctggcgatggcgatcagaggtcctgctgcgctctccgccgcgctctacctccattagccgcgctgcgcggtgctgcgccctcgccggtgcctctctcctgggtcccaggatcggcccccaccatccaggcacgacccccttccccggcccctcggcctttcccccaactcggccatctccgacccggggcgcgtgttccccccggcccggcgccttctctccctccgggggcacccgctccctagccccggcccggccctccccgcggcgcagcacggagtctcggcgtcccatggcgcaacctacggcctcggcccagaagctggtgcggccgatccgcgccgtgtgccgcatcctgcagatcccggagtccgacccctccaacctgcggccctagagcgcccccgccgccccgggggaaggagagcgcgagcgcgctgagcagacagagcgggagaacgcgtcctcgcccgccggccgggaggccccggagctggcccatggggagcaggcgcccggtgccggccacgacgaccgccaccgcccgcgccgcgaccggccggtgaagcccaggtaagcgccaggagcgcgccgtctggggacactcgtggcgggggatttctgagccgagcctgcggtgcccgtacggagcgtgttccccgtgcccctgtgggctgggccacacattctgacacctgaaagttaggaagcccgacgcggccagaccacggcggagcggtggctccagaaaacctgggcgccctctgccactgcgccgtcacctcccgcctggggcttcgtcgctctggccgaagggaccgcgccaaggcagcgctgccgctctagtgccacctgtcatcctggtcccttgcacgcacgttcaattttccctcccttgcctctctctggggcccagcccgctttccccgcctccttccctctcccctccccgccaggctgaagtttccagcggcggtggcggctgccctggcactgctggctgggctagggcagcttgacccatccagctgaggcttcttaatcc

SEQ ID NO: 13715 - DNA, 2654 bp, Homo sapiens
aaacaagactgagtggccttctgtccggagagcaggaaatgaaggctgtctggggccacatgtttcctgggacatgtggtgtcagaaatgggtactagaagaaccaggcctttgttcatgtcttttattttttatttttgtttttttttagatggagtctcactctgtcgcccaggctgaagtgcagtggcactgtctcggctcattgcgacctccgcctcaccggttcaagcaattctcctgcctcagcctcccgagtagctgggattataggcgcccgccactacacccagctaatttttgtatttttagtagagacatggtttcaccatgttagccaggctggtctagaactcatgacctcgtgatccacccgcctccgcctcccaaagtgctgggattacaggcgtgagccacggtgcctggctgccattgttcatttctatttcatgagtgatcggctcttgttggccatggctggaggagtcagctcccaaaatccacactctctaggagtgctgaaccataaataatctatcaggactcctagattccactctctagagctgcaaccagaagttccttccttcccggccctgcttcccactaaaggaaacatttgacttttggggatgagatgtttcaagccagccaatccttctcacaggaagcagaaccccagccaccatggagcttatccttggggcgcagagaaacactgacctaatgctgtaatcaagtactggattttatttttaaatctttttacctcacaagctgactttattctggctagagggctcctgaacctctgtaaactccccaggaggtaatttccagtgctaatctcgctaacgaggtgtcagttacagaaatggcccacgccctggtttcttctaagtggacattacagtgtttcttcagaggggcctgtgctgggacacctcggaaatggaagaatttatagcaaggatgttatttctcactaagtgagcagaagagctggaagatctctttagagatcattagaaggatggggaaactgaggctcagagaagggcagtggctgcccgaggccacagagctgagtggcagcagggttgggttagagactggaccttgtggcggagctggcctgctttgggctgttccacacaccactgactttctagattgtttcatgttcatggaatcatcctcaaactctactccccaaaattgtaccatagattaacttcgggcaccccccaagtcaaaacttcaacagctaagggacacggatcatgcggcctgctgaacacgccatcaagtggggcaaagtcttctttctttgtgatcagggtatgcactctcccttggcctctgaataagctgtacccagggttcctcgatgactcagctgcagcaggctatccaccacacatgtccgtggccaccacggcgggaaccgggctcaccatcacttaccactagagatgtcaaaccacccccctcctaacccaggccccactgcggcctccctgccctgctccagcctcggtctgttgtgcaagagccagaggggacttacgatcacggagccacacgcccaggcccaacccaggcccaggagctccaccctagggaaacgcctaagtcagaacagagcactcctaaccccccggggcaaggaggggaggccaggcagccggaaggaaactcctgagctttttacggaatgcacaagacaaaaggtgagggtctccacgtagggaaagaacgcattattatttacggccttggtctggagaggagaacatgctgctctttgcagcccggcgtgtgattcatttcccccgggagctgcagggccgaggcagggcgtgcgctccggcagcctccagacagccgcgcactcccgcccgctcgtttatttatggtgctttatcagcggctgtgcaccgcggcgataaagtttatgaaaagaggcggcgtctccggccggcgggctgggcccggcgctcctttcccacactgattaggatcagccagggctttggaagctgcagttaaggatctcgggtgcccggagcctcggctcccccttcctgccccgcccgcgggctggccggctgctggcccgcgtgggaggcgaggtcagggctgcggccgcggcccttcccctgggagcgggagggaggagggaggaggaggagagaagccgccctgcgggggagggagctccaaggccccgggaagtgggacagccagagaaaaataccgtccaaatataaatgggcaagtccccacgttaagagatgaacgagaattttttattttttgagacagagtctcgctctgttgtccgggttggagtgcagtggtgagatcttggctcactgcaacctccgcctccggggttcaagggattctccagcgtcagcctcccgagtagctgggattacaagcgcctgccaccaggcctggctaatttttgtatttttagtagagatggggtttcaccatgttggtcaggctggtctcgaactcctgacctcaggtgatccacccaactcggcctcccaaagtgctgagattacaggcggaacaggaatttaataggaatttttctcctctgaaggcggtgcaccgtctcctctcccccatttactttc

SEQ ID NO: 13716 - DNA, 2638 bp, Homo sapiens
ctgaacaggcaggaagacaagatgcccttgacggtctagattctgtaaggtcaggaattccttaaaaggttagaatttcccaaatctcaccatgtcctcatggtctgggtgacttagagggtcacagagtgattgtgagcccaagatgttgtgctgagtgtaaggtacagaggtcagagcctcttggagggtctgtgtgtcctggagagtgaatgcatcctcagtgccctcagcattcaaggacctgacagggccagaatgggtaccccaggcagcaggatgcattgtaattcagtgttctcttgtgagtccaagctgactgcatgtcactgggtcttgctaggttaggactgccatggggttcagggtgctccaggaggtcaaagtgtgtcctagggtaggggagaagggttaaaattagagcagtgtttcccaattttacgttgctatggactaaacgtttgtgtccctccaaaatttctacgttgaagtcctaacacccaacgtgatggtatttgaaggtggggatttggggaggtgattaggtttagatgagctcatgagggtgaggccccatgatgggattagtgtccttacaagcagaggaaaagaaaccagagctggttctttctccaccatatgaaggcaccgagagaaggcagccacctgcaagccaggaagagagccctcacaggggagccaaataggcggaccccttgatcttagacttcccagcctccagaactgtgagcaatagaagtctattgtttaaaccacacagtctatgctattttgtcatggcagccccagctgactaagacccacgtgcactcggttctcctggagatcttgatacaaggcagattgtgactcagtagaatggaggtggggcccagggatctgcatttccaacatgctcccattgctggtgctgctgctgctgctgatccatggaccacacggtaagcatcgaaatcctaaaggattctgatttcctgtcttgaatcaccagcgtgtttttaaaggacctgtatgacggcatgaccctgggaatcagactgtcctgtgggtacagtgtgttccagggggtccatgtgttctcactgggtcagtgtatcctgagaagcagaggtgaagtgttctgggtgtcagcgtgtcccaggggatcctaaggtcctgggctgttgcatcatccttaaactgtcagagtgtcctggggatgtcagaatgtacttcccaggtctaagtaacctcaaggggcagagtactgtgggaccaggctgtcctgactgctcagagattcccggtgtcaggattttcttgaagaatcagaatgtagtatgtcacgggaatctcagtctctttccaagtcctggagtctggagtgggtttgggggtcaggatgcagctggaatgcagatgttcaggtcagggttttcggagagtctgggtgaccttggaaggtcatggtgtcctgggggttctgggtgaatgaggaagtggtgtttgagggaggaaatcagaaagtacttgagagctaaggtgtcctggaggcccattctccggagtgggttcaggttggcctgagcactggctggtgtgttctgaactatcagggtatctgagaggggccagcatgcacttgtgacttctccttttttagtttcctggaagcagatccttgagtgtcacccccatgctgagacgccaggcaggctccactcctgggtccctttcccctgctcttcgttcctctccccacagtggggttgtgaggagggggtctcgggaggaatgcattttctcctcctccccctgcctgctcccaggaggggatttaacaggacaaaagaatccggtcctctgggaatacgagcccttggccccagtccctggaccctccgacagaacaccttccctcatccggcttgtgatcctccctgagcaagggggctctggtgaccgtgtagtgattggatgggcccacaggggcgaggaggaggtcactcctccaagactcaggggtgggatgggaaagtaggcagctgacagaagggagcagcatcccggtggggagaagggccaggcagagaaaagtagtcagaaacagagcaacaggtgaggctgaggcaggagattgagctgacactcaagccaaggaagggggaattaggaaacaattagaaaaaaagtaaagacagtgaaaaagtcagagacagctgcctgcacctacacacacattcagagacagagtcccagagggtggcatacacagagggagaaggggagggaacaggtgtggagaggagctgcggaagcagagaaatctcaagtcagagattcagggacacttggtccccgtggcgagccatggaagcagaaaggaggcgccaggctgagaagccaaagaaggggcgagtcggcagcaacctgttgcctgagagacacccggccactgggaccccgaccaccacggtgggtgagtgaccgtcccggtgtgcgtgggtccctgaggaggcagcgggtgtgaggctgaaagcataggctccatgaagaaggttaggaggagaaattaaaacccgaatcctatcatgttaaaactgtgggaacctttgaaagtaaaagggactggagcacc

SEQ ID NO: 13717 - DNA, 2637 bp, Homo sapiens
agcagacttcacctcactgctttattttttaattgtcagcccagccctgtcaggtcaccttggccaaaagctgtggtctggtgacctcttaagaggatgaattgctggtctcagctgaatgcttatcacgtagaaacacaaggcaccagatgttggctcattctacagatctctcgaagaaagaatgagcactgggactctgtctctgtggctgccttctagaaaagacaatccactggaggcagatttgttagcaggagctgtgcccagatggctggaaatcacattgcctctaagaccaagacccacggtcctggggcactacagtgacacaatcccatcagaggtggcaccaatgaagcaatacatttcctgaatcaaatgcaattgattagctaaacttgagcaacctgagaatggtgtagacaaagctgccagtgccctgcccatgtctcctggggaccagctcacacctgctggcttcctttctgccactgctgccttccactctggccaccgtcaactctgcacaggatacttgtccctaggagtagctggcagcccaagattgatgggagttggtggctaaatccccagcttcctcacaacttaggtaagacaacgcaagggtgcactctacaatgtctctcagtactagtagactagttactagtagtgggatgagtccaactgtccacaagagtgacctgctcatgacacaccctgatggactgccttcccttcccttcctcacctccccactcccctactagtacctcctggttcacttcccaaataaagtacaggccctcacagcttggtttcagagtctgcatccaaagacaatagatgccaattattcaacacctaccatgtgctttcctctgtggaaaggtcataaagggggtgggtcagggtcagttcagagaaagaatgagccaagctaagagtgacaaagggggctgggatttcttctgagacagagtcttactctgttgcccaggctggagtgcagtggcatgatcttcggctcactgcaacctccacctcccgggttcaagcaattcgcatgcctcagcatcctgagtagctggaactacgggcatgcatcaccatgcccagctaatttttgtatttttagtagagacggggtttcaccatgttggccaggctggtctcaaactcctgacctcaagtgatccgcctgcctcggcctctcaaagtgctgggattacaggtgtgggctaggatttcagatgaaggattgttcatcttcagctggccttccatccttcttgggttttgacatgcaatgcatatgtcaaccttataaacatttactgcaagtgttttacaagacccagaattatgggtttgctgaagaagcccagagaaaatggagcagacctttaaaatgaagtttctggactggccttttccatgaataataataaaagacagcatttatgaggctcttactttttgtcagatactgtgaccaagggcatgatcttattcagttgccaaaacaatgctatgtggcaggtcctactatgtttcattttgtggttgaaaaaactgagtctcagagagattaagtcatttgtccaaagatgtccagacaggtagatggtgcagccaggaatcccatggtcaccggtgtgccaggcccggagtgtgattaagatgtatagatcaaagcctccctcttcctctatcccactggactaccagatccagggaatggcgcatttctctgattggttctgtttttaacaaggtgctgatgctcattgtggaacactgcaaaataccccctcctttcttgacctttctgtctctgcaacagcctcatgtgttcatcataggcacatcaggtggaagggaatgaaagccactgtgacaaacaagacaaagaaagcccagcattgccagtggcctgggacctgaaaacaagtcattgtgtgttaattcttcatggaagaaaactaaaggtcgtgtgtgtcagtgtgaatgctggctgtgaaattaatgctttggccaaatgactcagtcgagacagaaacatgattttgttcgcgctggtgtgagccaacatctcaaaaaaaaaaaaaaaaaaaatgctgcttggaatcagtggaatcttcgaaggccaggcctttcagtttccactgctcctaaccaagctacttcggtctctctgattgctgccctgcaaagaccagacagaactcacttttctccatctttccacaggtgtaagagctaccagagggaggaaagtggaagctaccagacggaggaagcataaaccaggtcctgatccctgattaattgagaatcagccagcttgggaaggggatggctgcgcaagcccacagaacgcagactcccagaggaggcaggggtaggaaagctcttggccgtggcctgattgtctgggagacgggagtcaagatggcttggtttcaacaaactggctttgattacttggcgtttggctctgtgctctctggccaggtcagcctgacccacggttgtcaccccagaggactgtgaaataacaagtgcagttaactggccactgctgatctgcgcctagaagacaacgtctcagttgttaaggcttttgttggc

SEQ ID NO: 13718 - DNA, 2628 bp, Homo sapiens
cccaagtagctgggattataggcatgcgccagcacgcctggctaattttgtatttttagtagagacagagtttctctatcttggtcagctggtcttgaactcctgatctcaggtgattcgcccgccttggcctcctgggattacatgtatgagccaccatgcctgactagatttttttaaagttaacactggctaaatgaatgatatagtcagctataaacagatgatagtaaataagtccatgatcaatacagacaaatagaaacaaacacatagtgaacacaaaaacagaaacacagagaatcagagttgagggattgcagatgtgtgaatgacatgaaagttgatgaaggcaacatgtacatactggcccaagtacatgacaggatggcccaggtaggtggagttttgaaagctcccaggtgatttaatgttagagccattgacttgttgacccagaaccagggctgggagagggaacagggtctggattttgaacaagcccccaggtgacttgaggctcaccctgcagagccatgctgggataggtgacagaaactggggtaagtatagaaagatgaacaaagccagatagaagagggtacagcttgggaacagagctctccactgggttcaaaggtgaaacctaggccgggcgtggtggctcacacctgtaatcccagcactttgggaggcggaggcaggtggatcacgaggtcaggagttcaagaccagcctgaccaacatggtgaaaccccgtctctactaaaaatacaaaaatcagccgggcgtggtggcacatgcctgtaatcccagctactgtggagggtgaggcaggagaatcgcttagaccccgggaggcggtggctgcagtgagctgagatggtgccactgcattccagcctgggtgaaagagcgagactccatctcaaaaagaaaaaaaaaaaaaaagaggaaacctagaggtagacagcaaggagaggtgaagaccagtacaaagcctctatctgagccccaagggaaggcatttggggtcaggagcacctgtaggtcatctccttgcctggggctgtgaggagctggtttcaaggttatcacacatctgtgctcccagggcagctcattctctccaccctgacagtcacccaacctttgatctcctcctctcaccacacagggggctccaggccccagctccagaaccccctcccttcccgtgaccgccaccccaaccctcctccaatttggggaagccacagggcctcccaggctgacaaacagctgttccagcggtggagggcaagtcccaagcctgactccggctcagtcaccaaggtcagggcagaagagaggaggagaggtcagagaggaggagtaacgggaggaaacccaagggaaacagagtggaagaaatgggaatgggagggagggggtgtgaataaagagcggagatgaagaggcacaaacaggggagaggcagcaggcctgggtggtgggaggagaaagcaagagaggcccattttagagatctgttgcacatattggtgactactcagtcacttagtgactttgggagactgaggcaggcagattgcctgagatcaggagttcaagaccaccctgggcaacatggcaaaaccttgtctctcctaaagtacaaaaaattagcggggcatgttggtgggcgcctgtagtcccagctactcgggaggctgaatgaagcaggagaatcgcttgagcccggcaggtggaggctgcagtgagccgagatcgcgccactgcactccagcctgggcgacagagcaagactctgtctacaaaaaaaaaaaaaaagtattgcatatttcaaaattgctaaaagagtacatttgaaatgttctaaccacaaaaaaagtaggtgaggtgatggatatgtcaattaacttgatttcatcattccacaatttcatcaccttgtaggccgtaaatatatatttatcaattaaaacttttgaaaagcattggtaagatggcaaataatatgtaattatggcgtgtacctgcaatcatctaagagcacatgtgttccagttttaataattttagtaaaaggaaaaaaagaggccggcccaatccgcggcggcaggcgcatgggggcagcagcgagcactgcccagcagcgagccctgcccagcacaacctgctccccagaccaacccccgctctggccgcgccaaggcctcgcccccacccatgtagctccgccccactgccctctcgctccgcccctgtcccgccagtcccgccccctccgactccgcccggcttccgccaaccagcccggcccccgcccctctagctccgccccactgccgtcccgtcccgccccggcaccgccagctccgcccccgcccctctggctccgacccgcggcctccgcgccccgccctgcgcgctcgggctggctcggcggctgcggcgggcgggcaggcgggcaggccggcaggcgggtgcgcggagggctggtgccccgcagcaggtgggcggggtgcggttggcggcggcggctgggccgggggctgccggctgcgctcgggccgtgcgcggcggccgtgcgggcacgccatggacttcaacatgaagaagctg

SEQ ID NO: 13719 - DNA, 2626 bp, Homo sapiens
cattattcaaaaacaaggccgagcacagcggctcacacctgtaatcccagcactttgggaggccgaggtggacagatcacttgagcccaggagtttgagaccagcctgggcaacatggtgaaacctcatttctacaaaaattcaaaaattagctgggcatggtggcacacatttgtagtcccagctactccagatgctgaggtggaaggatcaccagagcccaggaaggttgaggcttcagtgagctgtgattgcaccactgcactccagcctgggtgacagagtgagaccgtgtctcaaaaaaaaaaaaaccaaaaaacaaaaaacaacccagcatgattatgtccacagataattcaaaagaagctacaggtgaatcattagaattagtaaatgaatttagcaagagctcagaatacaagtcaacgtaaaaattcctggtattttaatataccatcaacaaataattagaaaagaaatagtattgatgaagttttaccttaaaaaaaaaaaggcagcaagatggaacaagtaggaaagaaataaagacacattacccaaaagtcttgtcacatcacctgggaataaacactattaatgttatgggatactttctttcagacattttcctgagtgttatgcacacatgcatgcgtgtgcacacacacataaattaaaatatttgtctttgttgttaagttgagaaatgtcatagaaaataggaagggttgataactggaattattaggaaaccaggttatctagtgacagtgtccagaagaaagggacactgctgctgtggaaaagcagaaagcatctttggagaccccaggatgtagaaaatggcctccaaatcaataactcaatagcttttacttttaggctgtatgttgccttattagagaaggatttggctcactgaaaaagataaagttctgccctgcattggcctttaagagagaatctggttcctctaatagaatcataatggggcctgctctcctggaggctggttgccctggaaggcctttcgtttctaaaagctgttccaagaacctgtcaaggcaattaattaaaagttaatagagcattttcttcgagtcccaggacttgctcagctctcttattggcacagctcttcttggcaaatgacatttgagctataaaagttcaccttgcccttgagctccttgtgaccaatgtgtgtttttatttgtcttcctgccagtgcaggtatcctaagctcttatatttcagatggaaatttagctttctgcttcttcagatgctaaatctagaggatatagtcctcatttactgttcagatccacacaccactttcaagcaaagatttgtcatcccagatgttattctacacctacagtttacaaatatctgttgagttcccctactttgtgtcagatgccatacttggcactggagctactacagtgaataaggtacaagcccggcctttgaggaatgcatgttccttgaaggcacacatgtaaacaggtcttcctggtactgcatggtaggtatacacagggtgtgggagcagtgactaggggatcctaatagccctggggaattagagaatgttgttgagaaatgtttaagtggaatcttcaagactcagaatttcatgacttattgacagtactataatccctgtgtaattaggattatgtctttatgttctcattggataattaatagaacataggtttgaaaacattctggcatttaataagtaaataattactgcctgacttgtttttttttttttttttttttttttagaggcagggtcgctctgttgcccaggctggagtgcagtggcatgatcatagctcactgtaatctcgaactcctgggcttaagtgatcctcctgcctcagcctcctggttagctaggtgcatgccaccatgcctggctaatttttaaattgtttttgtggagatagggtcttgctgtgttgtccaggctgatctcaaactcctggttcaagggatcctcctgccttggcctcccagagtgctgggattacaggtgtgagccactgtgcctggccctaacttggtttttaaagaagtaactttcaagatctatatgtattaaattctttttccatgcctaggacaggtctttgaaagttcacagtctagctgagaacaggtttatctacctaaaatagagaatagcaggaaacagtcaatgaccagatacaacagatatacttctgtcactaacatcacacatcttttcattccctcaggggaaacactatcccagcctcaacaaggagcttgatttgggcacagaaacaggagaaagagacctgccttgcctcccttatccaaccggaagtattcttcttcttctgtcttcaatttattgcatgatcacatttattgcatgggtggcttcaggaaggattttagggattcctggaaataatcagtcttgaaatactcccctcttcttccttcatctaggatgcttcctcttctctcaatatattctcacttatgggtataaaggtaagttgagtcctcctttgatattaactctgccttcagttacccttaactttcctttagtcagctttcaacctagcctgaa

SEQ ID NO: 13720 - DNA, 2624 bp, Homo sapiens
caacctgttgccaaagttacacatagtacaggtgtgtggttattgcgggaggagaggatgaccactggagtggccctttaaggagctcccacatgggcttcccctgacaaccactctaaagacgatttctttcttagggtggttttcataaattgctaccaatggcagaccccaccccagtcctttgcagcagtcattgctaacaagaccactgcttgagataattatattccatgatgtaagtcatgggtgcaaacagactagcaaagaggaatacatcccagtattacttttgaagaatgctcttcctgtctcggtatcactgccaaattcccagattagacagagcaggcttttcctaaagtcaaagctttaactttctttataacttcagtcttcacttcctcttgtggaagatcaaaactgctggttcccatgtttttgtcatagtctcaaagctatggtttagtttgtgcaacatgggcctgacatcagtctgccacacaactatgtagtgaacatctgtgtactaagcattgaaagatacacaagtgtatggtgactgggccttgctctcaaagggttgaaatctgagacaataaaatattcacatgaaagttaagaatatatgatgaaaagtcagatgggccgggcgtggtggctcacgcctataatcccaacactttgggcggccaaggctggtggaccacctgaggttaggagttcgagaccagcctggccaacatggtgaaaccccatctctactaaaattacaaaaattagccgcacatggtggtgggcacctgtaatcacagctatttgggaggctgaggcaggagaatcacttgaacccgggaggcggaggttgcagtgagccaagatcgcgccattgcactccagcctgggtgacagcaagactccatctcaaaaaaaaaaaagtctgatgaaaaatatagagacaaaagtcacctgtgtcagtgcctgaagtggtatagggggaaaaagtcactgtggaaattcaagaggagaattttataagtaaattatatctcaagttttaaaaactcaggaaaaatggctggttattaaaagccaggatttcagtaagtgagaaggaaggctaacgacagtacaagacagtgaggagttgagctggttttatcatgtcggcctggggagaagggaaagccaaggtggcttccctgggtctaacatgttggtccctctcctctccccatcctcaggtggtgtgtaagaagtaccggggattcaccatccccgaggccttccggggagtgcatcggtacttgagcaatgcctacgcccgggaagaattcgcttccacctgtccagatgatgaggagatcgagctcgcctatgagcaagtggcaaaggccctcaaataagcccctcctgggactccctcaaccccctccattttctccacaaaggccctggtggtttccacattgctacccaatggacacactccaaaatggccagtgggcagggaatcctggagcacttgttccgggatggtgtggtggaagaggggatgagggaaagaaatggggggcctgggtcagatttttattgtggggtgggatgagtaggacaacatatttcagtaataaaatacagaataaaaatcaagtgtttttacgcaatggggatttaaagtgtgggcgacatggaatgaggggtgggtcagtgatcttgagctcagggcagaagccaggaattaagaagggaaatgtttgtggtggggctgctatgtttcgtgccggtccgccggtccgccgttgcgctgttctgaggtctacgaagcgtttgcagccccgtcgccagggccggccagatctgggtgggcctgggcagcgctcgctgggcggtgccgatttctggcaaggggggcgcagtctggatgtaatgggcgaggcttagcagggcggaatgggcgtggcccgaagaagccccgccccgtcccgcttagacaatgccccggagccgccagaccgtcgcgcccctgccccatcgtagtatatgagctcgcctacacaaggacccgcgctaaaagccagagctcccagtccccgaggcttgaagacggggactcccttctccaccaactctgtcctcggggggtggggccccagccgagatcacagcgcgacaggagtgggggtggccgctggaggtgagtcttgcgtggggggccctgaaccgtgtgggggccggagtttgggggtgccgggcccatgcctgcaccagacagagagtatggggagccggtatttgggcgcggagctaggcggggtggactttgggacatagacggggaaccgggtcctggagccgggagtagtgccagcgccccggaaccacgccccctgttaccccgcccctcgcatttcgttttagacctctcccagtccttcgggactcggtctggtttatactaggtcgcgctaggggcagcgtgaccagccagggcggagagaggatgcttaactccttaggctcgaactcctcccttcctacccacctctctcccttctcgttcgggtattcaggacttccattccccagcccctgcctctccagctttctccttctgtcccata

SEQ ID NO: 13721 - DNA, 2606 bp, Homo sapiens
tggtgaaaccccgtctctactaaaaatacaggccaggcgcggtggctcatgcctgtaatcctagcactttgggaggttgaggtgggtggatcacgaggtcaggagattgagaccatcctggccaacatggtgagaccccgtttctactaaaatacaaaaaattagctggatgtggtggtgcgcgcctgtagtcccagctactcgggaggctgaggcaggggaattgcttgaacctcgcaggtggagattgcagtgagccaagattgcgccactgtactccagcctggtgaaagagcaagactccatctcaaaaaaaagaaaaaacaaaaattagctggatgtggtggcaggcacctggaatcccagctactcaggaggctaaggcaggagaatcacttgaatccaggagacggaggttgcagtgagccaagattgcgccaccaaactccagcctgggtgacagcaagactccatgtcacgaaaaaaaaaaaaaaaaaaacacatgctcttcgaagcaatcaggcactgcaaccatggatgggtccatttctacaaaccattacagaatgggggccatgccaccaggtcaaacgccctcacccagagccaggcagttaggaagccaccacagggcttccaggagggcaactgctatggtgtgggtgccttgtgtgcttgcgctcttcaggggccctgctccacttctgatgctcctcaggtgagctcggtgccaggactacagcgacacggacctctcactgctgcacccttcaaagtccagcagacaacccctcgccctggggtaggagctcctctactcagctcctcacagcacctgccatcagtggggctggggaggggaacgttgcccatgtcacatcaactcacggctggccccacacagaaagggtcagcttactgggaactaactggaccctgaaataaacggaaagaaccacagcctgcaaatacctctaagcctcactcaaagcaggtcatgtttgctcatgaccaaattccggaagactgggaggcatcgggacagactccagaaaggtactggtggcaggggactggtctgctgagtcacagcaaccccacgctccaggccgtttgttcctgctgctccctttgggattaactagagattgaaccggctcaccttgtttcagctcaggccctgcaaccgaccgaccgtctgctgggctccaagtcacctgagaggcgaggtgaggtaagacggacagtaggggtggggtaaggcaggccgctctctcccatggtgacagggagctaagctgagctgagccggactgagctgctctcctcaggactcaggggtagccctgccctcccagctggctgcgatgctctagtgggactttctggaggaacaaacatgggaagacatcgggaaacctgacagcttggtcaagagtctactcgtgccatgtgggtgggggcaattcaaggggtccttagtgaaaagcagttgggagcttctcatcttccccacgccctcctctttcctgaggaccacagcaggggagggatctgcccaaggacacaaggtgacttagtagaagcagggcatgatgaagatctctagccaccaacatctggctaggccagggcaaagggacctgggccatgacctgtctgttttataaaccgaaatcgctgcagcccttgtcttggcatgagggtttcatggtagagcacgatgcctgctggagggccagcgggggtgggccatcccatccccaagggtcactggggttaaggacctgcccagactccctgggtggagccctgggccttggcaggggcccagctggttcctggccactggggccagagaacctgggggctgctgagttagttcagctgaaaaaccaacaaaagggcctccctgctatacccgggggctcatgagtcaccggggctttgggggagtgccaacatcatcatgacacagcaagaatcttatcagaccaatggggaagtcagcccagaaatgttctgaggaaaggggaggcgggggccgctgggtcatccctcccacaggcccatcattgggatgcgtcctgaacgcccatcaagcccatggcccttgtgatccaggtggggaaactaaggcccagagaagtgaggaccccgcagactatcaatcccagtctcttcccctcactccctgtgaagctctccagcatcatcgaggtcccatcaggtggggaaagatgctgttccaggcgcacactagtctacaaggccagagctttctggaagggggcagtaagtacctcggctccctttctggtaggggtgggagtcctgagaaggcaggaagtggcccacttggtaactctgaggtgccatcagggcccccaggaaggaagctgggtgtgtgggcaagtgtgaggtaagctggccagggaggaggaagggacagaggaaggccacgtgggtccagcctgccccagggtgtcctgcttgcccaggctgtgggtctgccagccacttgcctgctttcagtttctaggtcatgctgagcttgttcccaactcggggctccgggcatttgctcttccttctgtgtttgtgct

SEQ ID NO: 13722 - DNA, 2602 bp, Homo sapiens
cctgtaatcccagctactcaggaggctgaggcaagagaatcgcttggacccagcaggcggaggttgcagtgagcccgagatcatgccattgcactctaacctgggtgacaagagcaagagtccatctcaaaacaataaataaataaataaaattaaaaagtaaaacctgggattatatatcgctgatagatattcacgcttgaaccacagttactataaaatgcaaaaattcttaatactgttattctttgcactttttcttaatcattttatatatatgcatatatatatgcgcatatatatatgcatatatatatacatatatatcttgtttaggttgttttgtacagatgtgggccaccattgcaacaaaataaattctttttgctctaaaatatttataaagaaaatacttaaatgtgatgtacagggtggtaataagggaaaaatcaagtattataaacaagaatgaaggctttttttctttccttttttttttttttttttttgagacggagtctcgctctgtcgcccaggctggagtgcagtggcgagatctcggctcactgcaagctccgcctcccgggttcatgccattctcctgcctcagcctcctgagtagctgggactacaggcacccgccaccacgcccggctaattttttgtatttttagtagagacggggtttcaccgtgttagccaggatggtctcgatctcctgacctcgtgatccgcccgcctcggcctcccaaagtgctgggattacaggcgtgagccaccacaccgtgcccagaccaagaatgaaggtttttgtaaagatttctgttcagtgttttgcaaggtaaaattctaggcacgttttccctgaagttatgtgtatgtgagtattctcattcttcccaacttgcctttgaagagtgaaaaaacattattatcaagtagacttctattcagcttttgctcctgccctgctgtttatcccttaagaatgagtttcttggactttcccaatatgtgatttttttttcccatttagaatggtgattttaaatgtgtgagtgcatgcattatcttatctcagatatttgcacccccaatccacccccatctccctaaagctagaacactgccaactgatctgttgtataggtcctttagaaacacataattaggctgggcgtggcggatcacaaggtcaggagattgaaaccatcctggctaacacggtgaaaccccgtctctactaaaaatacaaaaaattagctgggcgtggtggcgggcacctgtagtcccagctactctggaggctgaggcaggagaatggcatgaacccagtaggcagagcttgcagcaagccgagatcgcgccactacactccagcctggacgacagagtgagactccatctcaaaaaaaaaaaaaaaacaaacaaacacataattaacacttaaggttgggtgctgccaattctttgtgaaaatccaaatattattaaggaaacagggagatgccactacctcttgattttccatctaaaaacatacatgtttatgcaaacaaatctttccatattcatagtgacttttcaagtatttgagtctaaagattttcatctcacatttttataccgtttaaattgttcacaattattacatacacgtcagccatcaactaaagttgtactttaaaaatttactacaatatatacactgctaatatttgtacttactctttttttctctagagtggaggtataattgtgtgatacttcagaaatacagataaatgattcaaaaagtctcagggagaataatgtttctttgatcgtgaataactgattagtaattcttgcctatattttcctgagagcatatgacaaatgtttctaaggtaacaagatgagaacagataaagactgtgtggtcttttggatttggagagacatattttaatttttaaatgcagttacaaattataatgtattcatatttgtactttctgttaaaatgcacgattgcaggattatttagattttgtgtttatgcttgatgaaaagctttgttcttgtttttaagtttgcactcaaaccttaagaaataaattcacccatattatcaaaaaaaatatttgtcctcgtgtttgttattcgatcttgcagttcactctcaggaacgcaagctcagatgacccctaaaatggtctctagataagttcatgattgctcaacatcttcaatcttttgagtatgggtcacattatacctctctttatcagcaagtaaactttacaacaaacatgtgacatgctgggacaaggttaaagatcgttttatccttgctgtaaaagctgatctgcctgtagctgccacagcctccagcggtggctacagttgaaaccctcacaccacgcaggaagaggtcatcatcatgtcggacgatttcttatggtttgaaggcatagctttccctactatgggtttcagatccgaaaccttaagaaaagtacgtgatgagtttgtgataagggatgaagatgtaataatattgacttaccccaaatcaggtaaggaggcagaatcgtgaactgagaaaggctgtggttgt

SEQ ID NO: 13723 - DNA, 2593 bp, Homo sapiens
aatctctagggcagggacaaaacgctgccagtctctttactaaaacataacaagagtcacccttgctctagttcccaaaaagttcctcatctccatctgaaaccacccccgcctagatttcgttgtccatatcattatcagcattttggtcaaagtcattcaacaggcctctagggagttccaaacttgctcacattctcctgtcttcttctgagccctccaaactgttccaatccctacctgttacccagttccaaagtcgcttccacatttttggttatcttttcagccgtgccccactctactggtaccagtttactgtattagtcgattttcatgctgctgataaagacatacctgaaactggacaatttacaaaagaaagaggtttattggacttacaattctacatcacttgggaggcctcacaatcatgatggaaggagaaaggcacatctcacatggcagcagacaagaaaagagcttgtgcagggaaactcctctttttaaaaccatcagatctcatgaaatttattcattatcatgacaatagcacaggaaagaactgcacccataattcagtcacctcctaccaggttcctcccacaacacgtgagaattcaagatgagatttggatggggacacagccaaaccatgtcacactaccatgcctgacttcctttccatttttgtatatttgcttgttcttcatttgcccgagaagtaactctaaagggctgtattatttggatattagattggcattttatctgactgggatatcttgctgtgattgtccatgtataagatcagcttttctataagccatatttttaaaaagatatattaattttttaaaaatccacctgtctaaataaatgcacaaagccccccaaaaacctagattctaagaaaaatctatgtactgccatacaatgattgatattaatatttatggtgataaattacacacaaaaaatgtgtgatctctgtttaaacaggcaaaaacaaaaaacacatgaaataaatctatggcatctatagccaaaactggaaacaacccacatatccatcaataggaaatcagttaaataaattatagtacatttatccaatggaagattaagcacatattcaatataattatttatacacacatatagatacacacatgtataaatatagagaatactgtgggtgtatgtgtgtgtgtgtttatatacatatatatacacacacagtactgttgcctaccttcttttgtcttaattctgtgaactctcattcactctgcttcagtaggatacatccttctttttggttcttagactcaccaagttgatccttgactcaagacattgcatttgctgcttcctcttcctggaatatccttccttctgatattcacatgagtagtctcttcttgtcattcagatctcaaatgtcacaatttcagagagcccatctctgatcatcatatctaaagttgtcctcattcccccatagctttctataccatgttttatttttttcataacatgtattttattactcctttctccattggaatagaatctccattagattaggaaatctgcctatcttattaatgcctgcaactggaatacttttgaagagttcttggcacgtaataaatactcaactaatatttttgtgtacacagaaataaagtttggaagaacagatgccaaattgttactagtggttacttctgagtaaaggagtagcatggtaggtaaattattaatagatgttcactttccaccaagatatgttttagttagtcttaacttacttgaaatgaaatttattactttaataattagaaacattgataaacattttagtcacaagaatgatagataaaattttgatgcttccaataagttatatttatctagaggatgcacttatgtagaatactctcttgaggatgttaggtgagtaacatgttactatatgtagtaaaatatctatgattttataaaagcactgaaacatgaagcagcagaaatgtttttcccagttctctttcctctgaacttgatcaccgtctctctggcaaagcacctaaattaattcttctttaaaagttaacaagaccaaattataagcttgatgaataactcattcttatctttctttaaatgattatagtttatgtatttattagctatgcccatcttaaacaggtttatttgttctttttacacataccaaactcttaatattagctgttgtccccaggtccgaatgttaagtcaacatatatttgagagaccttcaacttatcaagtattgcaggtctctgattgctttggaaccacttctgatacctgtggacttagttcaaggccagttactaccacttttttttttctaatagaatgaacaaatggctaattgtttgctttgtcaaccaagctcaagttaatggatctggatactatgtatataaaaagcctagcttgagtctcttttcagtggcatccttccctttctaatcagagattttcttcctcagagattttggcctagatttgcaaaatgatgaccacatctttgatttgg

SEQ ID NO: 13724 - DNA, 2579 bp, Homo sapiens
ctgtagtatcatgggcttcccagatatggctggacttcagcaacagtagccttttaaaaacaaattccatggccccaatatcatttagttacttttatttaaacttaccagcaactgaacactatctttccctaaaagatgaagaatcttgtaaatgcttgcaaagattaagggataagtgtaactcctcagtctctctgtccattcccaagtcaaataaccataattagtaacattaaggagtaaatgtccaataatattgaaacctatttccgtgttttttttttttttaagatggggtctcactctcttgcccaggctggtctcaaacttgggctcaagtggtcctgcctctacaggtgcacaccacttcacctggcaaaatctattttcatttccatttataaaacaatattttattttgtggcagtcttaaaacagcattttatactggatatttgcattaaaaattcaattggccaactaaactcttaacttcttcaaggcagtaatgtgttttttactttctctgtatcctccaagtgctaagtactgtgggaatgtatgctaacggctgtgtcaagtatattaacataaaagaaagatacaggagaaatatttgtataaaataatggtatactttgatgagttaaaattatttggggaaaatacggaaaactgaaaatatgtatagtagtccccccttatctgtggtttctctttccatgtttcagttgcccagagtcaaccactgtctgaaaatatgaagatattttgagagagaccacataaaagttcacataacttttattatagtattgtgttatacttgttatattttaatactgttaatctcttactgtacctaatttgtataaactttatcataagcgtgtgtgtattttttacatatataaaaacaatatatatagagtttggtactgtctacagtttcaagcatccactagggattttggaaactatctactgaagacgagggagcaagggggactactctaaaagaaactgagcacaatttccaagatgaatacacactcatagtctggaaaagaaaccacaaaggatatttgaaaaccatgtgatgtgaaacttcaagagactgccagtattcatctggaacaaaacttgtctgcactaaaaagcagtttaatattcgtaaagctatggtaaacaagagcagataaatattttctccaagaagatctgaaaaacagaacaaaacaggtaatagtggcacaaaagtcaggcagttccacttgcaaaacttaaaatctgctgctctggttggctccttgtaaggcacagtagtgacctctggtccctccacaccattcttaaagccaacttggttggttatacaagcaccacagcgtcatcactgggtgactgccactcttttagtttaaccaacttttcttgcaacttattgtgtaaagataatattaaaataaatacaaaaaaaaaagagtgggttaactaaggccttaggctaattaattaggtcatactatgtgtgtatctaatgaaagaaaccagctaacaaattactaatttgggaagcagccctttgtatatgtgcaatataaaatggtcctctgtacatatatattgatgattactattatatatgccaggcactgtgttaatttcttcacatgcatctcacttaatcctccaaacaatattatgggataggtattattagccccattttacagacgagcaaattgaggcccagaaattaaactgccttgtccaaataaagttgtaaattacttatcaggattcaaacccgggtctgtgtgatgtctccaaagtcctgctcttgaccacaaatggacagcctgtcggccaaatacagagtattttttaaaaaattgaatttagttgccaacatttaaaaatcagaatttatattaaaatctgtgtttccagcatttcccagcatttcaaaactcaagatctggcaacacagagctcaacgggcaactggctggtaatgaaatggagggggttccttttagatgggggtaggagctctccagacagtgtcccctcactcacccccgcggcgcctggcgctcttctcctgggtgttgaagtacaaggtagactttctctttcgcagctttatcttgccgtgggagcggttctggagaccatgcaaagtgaggctggcatctccgccccccggctccattccgcacttgcttaggggcctcctcatccctggccgccaccttcctaaggcggaagaaagctgcagtagcgcgctgctcgtccatccattaagtttggcctttgagagcagtcgtcgctcgcaagcccggaagtaaccgggaacgggcaacttcgtagctcccacccgacgtggtggcctccttgcggtttcctttcgccgtttccgaaccgagggattgctactcgcctttggcttggcggtctctgtgctcgggggtccgaaaactgctggaaggcccccggtctctggaggggagcaggcggtagcgagtttagtgacgtggagcaggcgcagaacagtcggaggtacctgagtg

SEQ ID NO: 13725 - DNA, 2559 bp, Homo sapiens
cccaagtagctgggattataggcacctgccaccatgaccagctaatttttgtatttttagtagggacagggtttcgccctgttggccgggctggtcttgatctcctgacctgaagtgatccacccgtctcggcctcccaaagtgctgggattaccgcatgaaccaccgcacctcgcctaattcttgttttaaaatacccactgttaacattttagtgtatttcctcccagtcttttttctatgcatttaagaaaattacaattagattaggtgttaaagatgtgaatgataccgctttctctctttatatatacttttctctgctttctactattgtttcgtactttctgtcatttgaatatgccatattaaatatgttgaaattatctttgctaaggagtcaacattagcaagaataaagtgggaaatgttcatttattcctgaagagtttagcaaagatcatatattcgagtcattaattcttgcttcttaactgcttgaaaatcaacccgcgtataggagcccttcatcagtcaacactctcatggcacttatttctggtaggggccgggaaacagatgggaaagacaacttcctaggagctctggtcttggagcgagggaggttcatgaaaattatacctatgttcaattgtggccaataaaataaagaaaatcaagtgtgaatggtttccttgatcagggcttgcttctgaagggcagagctgataacgtcctcactttgagcaaaagccacaaagtagttatctttccttacgcctttagtttttgtttaaaggttcattacgaactttagcagtgaaaaaaagtgtggcaactgggtcattctgacctagaagcaaccaaaatacttctgattgccgcagcagacaatgatgaatcatacctaaacaagtttgctgccttttcatttctgtgggtcgtaatcagactcattgttttgtagccagtgagacatttgcagcagcatgtttgggtctgtgggaggagggaggcttgcagatcttcccagcgatgtgtgtgcttgtccccactagcgcagtggaaacagtgttcttgttatccaggtttaagccctgttagggatatggcttgtccattgtcatcgtgatgatactgcttaaagatatcctttgttgagcacctgccatatggcagacggtgtaaaaggtgctttacggtcctggtgtcatggaaagccttccaacaaccttatgatagaggtattattatcttcattttgccaagaaaactgaggctctgggaagttaagtcagtcacatagccagtagataccaggcacccataaatgtttgttgagtgaatgaataaatgaaggaatgaatggcaactccaaactaatgggagagaaatgcaagaagagagagactgatcaacatgagacaaaaaacttggtgctacaagttaagaggttttgcacatcccaattattcatttttgcaatttttaagctccactttcaaatagagacggggattgggatgggatttcaatgcaggcgaataacacaagacagatggaggaatatgtttatgatcagcaaagagatcactcatcttgaaaaaaacagataaatgggaaaacactgaagtgccagccacagtactaaatactctactacattatctcatttaatcctcacaaagtcagctttgaagtcagcactgttatctctgtttatggctgaggaaactggagctcagggagtgagggaggctgtccaaggtcacacagctccggtgggtgagggggcagggactggacccaggcacacccagctccacagcgtccctgagactctgtaaacagaagccgggaacaacaatttcattatttatgcttgaatttaattttgtgtttgatggaggaaaaaatggatgatacacagattgctaccaacaaaacccaacaattggttctttgagattctagcttagtgcagggagaaaggcaagccggtgatgaacgttttggggtagccagaaacaatgaactaggggtgactggtgtgaaattcagttgtgtggaccatattttctaaactagaatctgcacaccatgctctcccgccatgttctcccctaggagaaaattgtagcttgcaggcagaaatgtaaacacataatcaattctactataacttgatatatgtgttcctaaaaattattgcaccatgcaagattgggcaataaaaaccgcagggtttatgacgaatacaggcttagggcaacagctctcaaaaacttcatcaatgacacattttttaaaaagataaaaacctaataaaaagggcagcaccgttttacacatgctaaatggttaagagatacataaatactgcagtagagatgggattttacctcaaagtgcaaaggtaaatgaaataaagttttttcaatggaaggcttgcagctcttgaggacctgccaaatggaagaaggacagagacctggagccctatggaaagttctgacaccatgtgtggaaggacatggcttttaacacgtgtggtgactg

SEQ ID NO: 13726 - DNA, 2539 bp, Homo sapiens
aagctctttcctttgcttcctgtagaagcccgtcctagagccctgggctgtgaggaggagcagccccacagggtcacactgtccttttcccttgcagaccttggcacccgccatcaactggttgccttttctcaacaccatcttctaccccgtggagatcaatgaatccgagcctattgtggtctatgacaaggaataccttgagcagatctccactctcatcaacaccaccgacagatggtaagaggacccccagtggcctggggcacgcctctcacagacagccctcttcttgggcaggtgggcaggggtggggatgacagtctgactcaggagagtgggacctgggcgggcttttacgagaggcagcaggacatcctggttacaggcacaggtttaaatcccagcctctttcaaactaccagctttgtagccttgggcaaatttcgtaacctttcttaagttcattctcctccttcataaaatggtgatacaaatatcacctgtggccgggcatgaacgcccgtaattgcgggacttttgggagacagaggcaggaggatcccttgagtccctgcgtttgagaccagcctgggcaacatggcgagacggtgtctctacaaaaaataaaaaattagccagacatggtgtcgcgtgcctgtcacccagctccttgagagggaggctgaagtggaaggatctcttgagctcaggaggcagaggttgtagtgagctgtgattgcactgttgcactccagcgtgggagacagagtaaaaccctgtctcaaacaaaaaaacctagcacctaccatttagggctgttgtgagaatcaagtgaaacaatccatatgaggtgatttaatagagtgcctagcatatactgggactcagtaaatgttggctattatttttagttaatacttacgattttctttcttttcttttcttttttttttttttttgagatggagtctcactctgtcacccaggctggagtgcagtggcgcgatctcaactcactgcaacctctgcttcccaggtttaaatgattctcctgcctcagcctcccaaacagctgggattataggcgcctgccaccacaccggctaatgtttgtatttttagtagagatggggtttcaccatgtttgccaggctggtccccaactcctgacctcagttgatctgcctgcctcagcctcccaaagagctaggattacaggcataagccaccacacccagcaatacttataatttttaaaaaattttttgaaaactaccaaaaaaatagggaaaaaaatttatcgtatttaacttatttttttcctaactccccaaacttacttgttaaaatttttttaatgagatggggtctcactatgttgcccaggctggtctcaaactcctggtctcaggcaatcctcccaccttggcctctcaaaatgctaagattacaggtgtgagccacctcaccaggctctgaaaaaattttaaatgactcctgttgatcttgtggtatgtgtgtgtgcatatgtagagagaaagcatgggggagggcaggagagaggagggaaagagagatcggttttctaatatgtggtctttttttcccattatcataactaaatgtctagtctccttttcccttgacctgtatcctgaacattttcccccttgtcatctcaaaacctctgcaaacatcatttttcatggttgcatagtactccgtcgtgtacaaatacagttctttacttcctccttctcattatcaggcattttggttgattctgattagaggttagatgttcactacagtctcaaggtgacttcttggcaacggtggcaacagctacagataggttccctgtgccctgcaggtggggcagtaggagctgtcatcatggaaagcttggcctggctgggctgagcttcttttcctgcccctgctattcttagcctctctggccttctggctggggcacctccaagctgtagaagtggtagtcacctctccagcccagccctgtagcatacaccattggggtgggtctccatgctggggcttcatagcttccagacacagagcagctaggcaacaagcatttattgagcacctgtggtatacaagtgactgcactcaacactgaagcgtttcctatggtagaagacccaggcttttcccttgaagagcttacattgcacgtgcttagggagcagtaacccaccaagcccccgcaggctggaaggggcctggggtcacaggccaagtttgagagccccctaggggccagcaggggaagggccgcaatcctccctgcctaggtgtccctgagcctctctggcctcctctccccgcagcctgctcaacaactacatgatctggaacctggtgcggaaaacaagctccttccttgaccagcgctttcaggacgccgatgagaagttcatggaagtcatgtacgggaccaagaaggtgagcctgctactgcgtatgcctgaatatgggctgagcgcctactttatgccaaggtgtctatggg

SEQ ID NO: 13727 - DNA, 2525 bp, Homo sapiens
agagatcaagtcatttgcccaaggccacagagctggtaactagtgaaactgggatgtgaacaaaatctatctgacttcagggtcattgctgtcacccacaatgcggagagtatacaaaggtttcagatgtggtacctgcctagatgccaggaagatataggtctattggcaagtcaaaacacagagtgaaaaaggaaggaataaagaaggaagggaggtggctgagcatcaaataaatggtacagtccttgctttaagacatcagagagaggagcgggcagggagggcctggctcacagcatttcaggaaactatcaggaaaagcaactcttgagctagggtttggatttgtaggggcacttcccaacctttcttacttaattggcttttaagtttacacagctgtgtgtatatctaagtttctgcctgtgtgagctacagtgttctaataaaacacaggcaatttagtaacatgatgtaaacatacagaattgtttaacaagtaccaggaaaagacatccagtaacaggaaaggacacccaaatctattttggttaccttagtaaagcagggttgccaaactatttattgcccataagctaaatctgtcatgccacctgttttttatggcctgctaagaatggtttttacgtttttcttttttctttttgtcaagatgggtcttgccatgttgtccaggctggtctcaaacttctaggctcaagtgatcctgccccctcggcctcccagagtgctaagattgtaatcacgcgtgtaggtgtaagccaccacacctggcctttcacatttttcaatggttaaataaaaaccaaaacagtaatattttgtgacttatgaaaatcatatgaaattcagttttcagtgtctgtaaataaagttttattggaacactgccgcatgcattcatttactatttcctgtggctgctaggatggcagggttgagtagctgcattacagagcctatggcttgcaaagcctaaaatatttactatctggccctttacaaagtttgctgaccctgccttaaagtgccccagataatctccaccaggcctgatacatattttttttggggggggggggggaaatatgagaatatagaaaaatacgggactatgcatcccccattcagaattgactattgctaacagtttgccatttgcctcacagccatttataagtactaaaaggaataaaactttacaacattccttatgctccctgtcccgttctgtgcttttttccttctttgtggcacactgtcatgaatttaatgtatattcttctctttgactttaaaaatcttgtatgtaagcatgtgtccatgaacagtatctactgcatgggattttaaggtacacacaaattgtacatcatgttgtattctgcaacttgctgttttactcaacattatgtttttgggatttccttatgtcagtacagatccagtgcaccccttttatctattagatggtattccatcaaacaactataatgagtttcatttatccattcctttgatgaacatataggaagttgttcccaggtggttttttttttgtgtttttgttttgttttgttttgtttttgagatggagtcttgctctgtcacccaggctggagtgcagtggcatgatctcggctcactgcaacctctgcctcccgggtttcaagcgattctcctgcctcagcctcctgagtagttgggattacaggcgcgcgccaccatgcctggctaatttttgcattttttttttaagtagagacggggtttcaccatgctggtcaggctggacttgaactcctgacttcgtgatctgcccaccttggcctcccaaagtgctgggattacaggcgtgagccactgtgcccagacttttttttttttttttgaaacagtcttggtctgtcgtccaggctggagggtagtggtgcgatctctctgcctcccggttcaagtggttctcgtgcttcagcctcctgagtagctgggattacgggcaccgccaccacaccgggctaatttttgtatttttgatagagatggggtttcaccatgctggccaggctagtctcgaacttctggcctcaagtgatctctccgcccgggcctcccaaagtgctgggatcataggcgtgagccaccatgcccggcctcaggtttttgccatttccagcaaatgcatgcacgttgagtaacatcagaagaggtggatggccgagcatgttggctcatgcctataatcccagcactttgggaggcagaggcaggaggatcacttgagcccaggagtttgagaccagcctgggcaacatagggagaactctgtctctacaaaaaatagaaaaaattagccaggtgtggtggtgtgtgcctgtagtcccagctactcaggaggctgaggctggaggatcacctgagcctggggaggtcgagggtgcagcgagccgtgatcgtgctactgcactccagcctgggcaacacagagagaccctgtctca

SEQ ID NO: 13728 - DNA, 2514 bp, Homo sapiens
ctggagtgcagtggtatcatgtcggctcactgcaacctccgtctcctgggttcaagcaattcttctgcctcagcctcccgagtagctgggattacaggcgccggccaccatgccctgctagtttttatatttttagtagagacggggtttcgtcatgttggccagggtggtctcgaactcctgacctaaggtgatccacctgcctcggcctcccaaagtgctgggattacaggtgtgagccaccgtgcccggcccaattgcattttcaaagtgattttaaattggtggttgaaacctttgaggacattaaatgttcaaaacgggtgatgtgtttccttttcttaatattttagcgtctgcttctacgctttgcctgggagaggccctggtggcctcgttcctggcgcccggagtccctgctgcggccccacccccgggcggtcacggtgacccatgctgcccagcctggaggtaaaatcgttcgtggctgtggcttcagcatgtcgtcctcggtgaaaaccccagcactggaagagctggttcctggctccgaagagaagccgaaaggcaggtcgcctctcagctggggctctctgtttggtcaccgaagtgagaagattgtttttgccaagagcgacggcggcacagatgagaacgtactgaccgtcaccatcacggagaccacggtcatcgagtcagacttgggtgtgtggagctcgcgggcgctgctctacctcacgctgtggttcttcttcagcttctgcacgctcttcctcaacaagtacatcctgtccctgctgggaggcgagcccagcatgctaggtaggcggcggctcgggcagggtggaagccggccacctgccaccccacagggagcagccagcaaccacccgggagggccgggggagcccaggtcaggatgggagaccgggggtggagcccactgcaggcacgggaggggtgattctccctcttgtcttcggccccctccctcccgcaggtgcggtgcagatgctgtccaccacggttatcgggtgtgtgaaaaccctcgttccttgctgtttatatcagcacaaggcccggctttcctacccacccaacttccttatgacgatgctgtttgtgggtctgatgaggtaaagaatctcctggttttggttgagtgtctctttttctttaaatgtaaagtccctctcgttactagagcggggactctgctggctggtgagttttcagtgcagactttataaaagcaccagggctgtccagatttcaggacaccaaatgaatgtggcttcgtggctctcactgccacgtgtgttcagtcagcttctttccgggctggtggtctcaggacagggtgcctccttgtctctgggacgttttcaaggggtggcagaagtcacttcccattggacgcagtgccgtttcctgggggctcgacctaaagcgtcacagaagcgggtccaggcaccatgttggtgatgaggaggtgggcggagaggggccgacgtgccaaccgagcgagcgagccccttggagagcctgcccggtgggtgcaggcagacagactcgttctaaggtgatggtgcttttggctcatttttaggtttgcaactgtggttttgggtttggtcagcctgaaaaatgtggcggtttcgtttgctgagacggtgaagagctccgcccccatcttcacggtgatcatgtctcggatgattctgggggagtacacaggtgaggccccctgggccccacccctccgcctgcgccccaccatcccaggcctccatccgtggtgcccgtctctgctgcctgccatggggctctgccgcgaggaccactcagagtggtgcccacactggcagtgccttcacttctctcacggtcacatgtgcgggggtgtcttggagcctggcgtctgccaggtgttctcacactggcatgcggaggtcagggcagggttgtgtctcgtggccctaactgggtggggagacaggtgggggctgggcagattcctggcaagcaagattactgcaggtgccaatcactgatccgaagaggacgggcgggggccgccttcggccagcaccatacaggcggccgtggcccctggtccgtgggccctcctgtgccagcaccccacagcctccccagcacccgccaccacaggcctgtcctgggccccagcccctgacctcagctgcaacccaggctcctgcctctcccacctcttaatgactcacaggcgatttccagtgacatgtcagccccatgtcgcgtacccagtgtggctgcatgaaaaccagcgaggagcagaggcgcccacagagcgcggcatcttgaacggagtgtgggggtgcacacgtgttcgcttatttaagaaacgacaagatcttaaggccgagggaagtgtctgtctgcctttggggacgggaggaggccgagggtccaggatggggttgggcttgccccacatgcacttgagacccgcacacacgtttaggtgattat

SEQ ID NO: 13729 - DNA, 2512 bp, Homo sapiens
gcaatgatagcttactgcagcctcaaactcctgggctcaaatgatcctctagccttgacctcctgattagctgggactacagaagcaggccaccacgtctggctaatttttgtatttttctgttgagaagaggtcttgctatcatgggcaggctggtcttgaactcctggcctcaagtgatcctcccgcctcagcttcctgaagtggtaagattacaggcatatgccaccacacccagcttttttgttcctttgaaagaaggcattgctaatgattgccctgaggtgtctagatgacccggccagccatccacctctgcagtttacacagcttgttgatctccacagtgagaattaacttcacaacctgggtccaagaggctggaggattgtcagtctttagaaaaaaaaaaatctattatctttagagaagatggacttgttgaggaagaagagtagacaaatactttctggaaatattttcaaagggaattagaaaaagaaaaagattttggttgtcctttggtgaatgagaatattcatcagcagaatgcctcattaccacgtcacacagctgaccaaggcctcatctgagactgtgtttgaatagaaattaaacagggctgacagtgaagtttctgcttttaattagctttcaaaggtacacctctacctgtgatgttgaaacatcttgaaaaacctctctgctctgtgcctgaatgaggggcatctagagggcttggaagagaagatgtggcacagggcagccggggagaggctggtggccagaagatggacctgagcttggtgaatttacctggcatctgagcctggcctgaacaattcagaaacctcatttcatcagtcttggagtcagggctcctgtctcttagcaaaaagctaaagcatacatcaagcatatttattgacaagcgtaaccactgtgaggttataaccagggtgctctgtctgcttatgggcaccccacccgaccagccaaatggtcagagagctgggtgggtcggggaaagggagggagggagtcatgggaagcagttgtgttgaatggctacaggccctggtggctgggtgcatccccgtatgccatccaggcccacccactgctgggccggaccttcccctctggacagttcttgcttgggcactgactgggtttgctgctgaacctcctggcctggcagctctggttgctgatccacccgcttctttctttatagagattaagagcggctccagtgtgtgtacggagagcctctttgaagcgctgttgcctttctgtggctagatccacgatcttctctctgggatcaccccataggacatttgctttccaccttctccagtcccagtgaatgcatggacctctgtcctcattgttactggctgagccagatgtcagtcctgtgacctggcctcaggaccactcttgtagcccaccgtgggtggatgaagccggtgggaacagaatgataggagttaaccactttttaggcgttattgggccttttcactttaatagcttaacagagacatctgtgatggcttgcatccagagtgcgtggtgtttatttttgatttgaaatatgaaaagcatttttttaagacaactgactcctctgagtcatgcccaggggagcaaacggcctgaaatatgagcttgtgcttgctggaggaggatgacagaggagcctgctgctgagttcactggtgctggggttaggtcactgctgggctgaagcgcactgaccataagagcaacatgtgggcaagagccgcggcactggggtaatttattgccgccgctcgcttcaccaggaaccccacacgctgggttcccacaggatgcgacattcccacaggatgggacaactgcatggaaacccacactcgggcctgtgttgagcaaccacgtttgagtaagagttatcttatttggcagggtgggttaggtgtggggtatttgtcactgagaagcagaaactgtatgctcgacacacactccctgagtccttagggaattgcgtagtttttttcttttcttttctgggttcatcttaccagcagtcgtgtttgagaatgtgcacagctcaccttcgttcagccctttacagtttacctccatagccttctttgcgtcttggcaccatcttgcgaggtgtcaggccaggtgttaggatgctctgtttacagatgaggagattgaggcatgagttgtgattgctcacaattgcctcctgagtggtggggccatgctggggcactgtgcccagactctagacttccaggggtccgggacctcctgctgccagtctcctagcccgttaccacagctgtctgtttcttggcctctccctagatttctaatggaactcttggggtacagtctggaaataggtattttaaacatgctttgcagtgattgttacagatcttcatgttcaggtggcccaggggctgaccctgctccaacttccccctcagacattaaacct

SEQ ID NO: 13730 - DNA, 2484 bp, Homo sapiens
ggatcattttctcatttagcctgacatcaagagtatttatttggctttctataccattagtttaaattagaacactctatttccatccactagagtagaatagctatgtgttttccctttaaaagataaattaactctgtaagcattaatactttaaaaaatgactagtggtttttcaaatattttagttctaccaaactgatgaatagataaacatgagcagatagatctggatttaaatcttgattccacaatttaccagctctgtgaccatgggcaagctccttaatctttcaaagcctgttttctcattagtaaaattaggataataatagttctttatagggtaatcatcagaagttaaaaatgtacatatgagaaattcagcacagagtctggcacaaagcgattaacaaatatttgctgttattcattcttatcatcattattataaaatgttgggttgagctgggcatgacggtgcatgcctgtaataccagctatttgagaggctgaagcaggaggatttcttgagctcaggagtttgaggctgcagcaagctatgatcgcaccactgcactccagcctgggagacagggtgagatctcttgtctataaaaagaaaattaaaatgttgggttggcaaaagggacatagaaatgagtaagatgctgtccttgtcctcaagaagctcagctctgtggtaggagagacaagacaggtctgcaaacatcatcacaaaacaatgtgataaggcaacagagggacagagaaagcacagaggagggagggatcatttccataggaaagtttcatggaaggcttgcaagaggatgtgaaaattacattgatttttaaagaacgaggaggaattttttaggtagcccaagtgggacaggacatagctggtcctggagaacatgtgtaaaggcacggagaaaggaaactgcatggtgttttgggaggaactataattagtaatgtttggtcagatcatgaggttttggtgggggtgggtaagatggaggtggtaagatagaagattctagaggaagtcaaggcaaggaccagattttgaagtgttttgcatgcggagctgaagagcttgaatttagcaccagcaatagggtgtcagtaaagagttttataagagagatgtgatcagatttgcattttagaaaaatcactttggcaggtttgtgaatgatggaccagaaatgtgtgatggtggagacttggaagccaattaggaggcagtagtccaggtgagaaataatgccccgaacaagggcaaatggcattaggaatggaggggagcaagctgaactcaagagacccttgggaggtaagatgaaaaggatggggaggagggaacttgttgggatctgtatctaagggtacccgaccccttggtctcattccactgttccacaggggttggtgacagtgtgtgggagacaggggtggacagaagtgcgttaaccaagatacagactagagaaggaagcgtcagttcttaggacaggggtcagtttgtagtgtgggaaagaggaggtgagaaagggtagtgaatttcacctggcccttgttgagtatgtgatgcctgtgttcgccatgtgaacagcagaaagcagcaaatataaggatcgagagcacggggtagagagagggctggcgatggacaccatctttagggtaattgcgaaattaggggaagggctgaaatacggaaggctcgccgaagatctctaggtagttaataactatcaaaatgtcacttctttggccttcacttttattatgtaaaagtactcagatcaggccgaatacaattttattctctttatccaatgccggaggctattgtcgaagccacggcctgccatttcataccctttgcaataggtggcgctgacgcctggcagggagaaggcggcagcacatgctgggctcgggggcgatgggcttgtgcgcggacctggcgacgctctagccccgagccgcgtattcgtggccgggtcctccctgggaacagggtgaaggccgagaacctctggcctcaggaagcgcatgcgcaaccggttctccgaaacatggagtcctgtaggcaaggtcttacctgaatcaggtaagaggcgggcggggaaggagtggagcctccccgtgcaccctcgcagcccgctccaggagtgggactagccctccttgggggtgtggctcgtgtgcgtgggccacaccagtcctaggggcaggtaagtgcgcgtggcccaggaggcgtgaggctgtgctggcgaggggagggctcccggggcgcgtgggtgcccatacgaggtgcgccgccgccggtccagaagagggccacgtgggcgagagcctcggtcgtcgcctcccagcacctcggggtcgtagagaacacaaaagtcacacaaccctcgccgaggcttgacccccgcgacagagtttagtcattccgttagctggctc

SEQ ID NO: 13731 - DNA, 2480 bp, Homo sapiens
agaggcagagtcttctgggaactggcacactgcagagtcaaggcggcccactcatctctgccctttacttctctcacacccagtccctgctgtccactcccgcgggttttcccacttcctccaagcaagcagcgacttccccaagccaagctgttggtcccggaggacagggcttctggcaaggtcggcagtcactcggagcccacaaagggaagcgagaccagccccggtgccaccctttccagaccactggctctcgcagaactgggtcactgcggccatgtttagatttctgtaaaacaaatatttgcctggccagtccagtcaggtcaaggagtgtgctaagtgacgagggcgggagtggggtggtgggagatgtgacaccgcggcggccactcacggtggctgctttgcggacccagagtgtcctgagtgggaggagagagtgggatattctttggggaagggcgtgccattcaccctttcacctgcacctcccacatcccgaggctctggaacttccagtgaaggccaagcatctccccggctggacagcaagccaacagcacaggtgaccaggatggattttcattccttcacgcccgggcctctcccgagacccagcatgtctccccgcgagcccactgagagataatcattccacagtgctccgtggaatgcctgccacgtgccagccaccagctaaggttctgggagcacagctgtgaatgggacagacatgggggagacaggggtcccacaaataaccgctgtgatgaaggtggagggaggggacagccaggtggcgtgtgaaagatgagcagaaagaccagcttcagcgtggatggtgtgaaaggtttctgacggcctgccaagtacttcagctgagatctgattagaagctggccaagcaggctgggtgcagtggctcatgcctgtaatcccagcactttgggaagctgagggaggcggatcacttgaggtcaggagttcgagagcagcctgaccaacatagtgaaaccctgtctctactaaaaatacaaaaaacattagttgggcatggtggcaggcacctgtaatctcagctacttgggaggctgaggcaggagaatcgcttgatcctaagaggcagaggctgcagtgatctgagatcacgccactgcactccagcctttggagactctgtctccaaaaaaaaaaaaaaaaaaaaaaaaaagtatatatatataaacatatatcaaagaagttaagcaaagtgaggaaaaatgcactccgagcaggagggccagcatgtgcaaaggccctgcggtggaaaggaatttggcctgtttgaggagctgagtgaaggctcatttggctgggtcacagggataagaaggatgagattcaagggcttggcaggggtcgacagcagccttgaggtggtggtgagaactggttgttatcccggggactgtggaaaaccaggaagggttttaagtgatggggtcttggcagtggatgtggaacatcctggtgggaggtggtttcagtcattcagccaaagccaagcatggtggctcacacctgcagtcctagcaacttgggaggctgacgcaggaggattgcttgtggccaggagtttgagaccagcctggggaacatagttgagacccccatctccaaaaagaagaatgtttttaaagatcattcatttgagaggtgatggtggcttgaatcttagcagcattagtgacatggagagaggtagaccaacccaagaagtgtttagggagtggggaaagcggcaggggtggggctcgtctggaagaacctgagtgcctcgcaaggggcagcattggggcagctcgtaggtaaaacagttctcctttctcatagtctttgcttcctccccgcagcttctcgctgaattccgagggggctgagaggatggccaccaccgggaccccaacggccgaccgaggcgacgcagccgccacagatgacccggccgcccgcttccaggtgcagaagcactcgtgggacgggctccggagcatcatccacggcagccgcaagtactcgggcctcattgtcaacaaggcgccccacgacttccagtttgtgcagaagacggatgagtctgggccccactcccaccgcctctactacctgggtaagccgggccctgcaggctgcttgggcggggacagcatctgggaccacagttccctggtcctctctgttcccagaggtccacaggagttggaagatctgctcggatggctgggccctgggcatgctgtccttcgaggctcagccacagacagctctgactacagggaagggctgccgcggggtgggtggggcggcccccggagggtcagccgtgcagggagccatgcacagggcagccccgctcctccatgtggccaggatgccgtggctcaagccggccctgtggctccaagcccggagattgtttccagtgctagtcagcc

SEQ ID NO: 13732 - DNA, 2298 bp, Homo sapiens
gccactgacatttctcctctgatctaagtctctgcttaacaaagaagcctgtggctactcttaaagtctccccatctggaatgggggtgagtttgttcagctcactccttcttctccttcctgagcagctgacttattctgatgtggttttgcggttatacagtaagcagcactgcttatgtggacatggtgtactttcagtttctgaaagtgagtcatgttgactttcctctgaggagtaagagtgacccttgcttaaaaggacaacatgactagaaggaagaaacaccagaggccaccaggaccagaatgtttaccaatgtaggcagtcactagtttttaggagtagtttgtgtcatctttttaaacaaggtaaactaggaagaaacatttggttttgaatctttgagtgtttgccaatgtttgaagtacttatctatttttactcatcatttaaagtgatgtttgtggctaagagctcaagatctacaaacatacttaaataagtttacatttggtcagctggaacctgatggggacatttccaagaggatcacttgctagtattacatctttaattttcatgtatgttaatggcttgtgatattggactattcatccaggccctaagaaatctcagcaggtctattgagaatcaaaattaaggctgtacatagccactatacagaataaggagtttcttgtaatctaactctccttcgtggtcttatttggttaattttttcatgataacatgtagagccaatatgggctcttgtcaccacttctgcatccttgcaagcattgttaattgtcttatgtttttcttgcttagccaggatgtagcctcaagatacttcccgtcaccatgctcctgacagccactgctgtcagatcacagtagataagtgagatcaagcccacttgcatgtctgccctagaatctccatttaactttgctcttgggtatccaaatcataggagtgccgctgtcctccaatcaaggagactgtctttctttcctcaataattaaatccctctgggtccaagaaagcgcgaatagaattattgtcaaattctatatcactgagccatcatcactacctattgccttggtaagtcatttgggcaattggagagaataagaaaagcccagtagtgaagcagcatgtattaaataattagtgagatattcaagacagtttatatttcacaagtatataaaaattgctattacttcacgggactgaatttccttttctattttctctttctttctttctttctttctttctttctttctttctttctttctttctttctttccttccttccttccttccttccttccttcttttttttgagatggcgtcttgctctgttgcccaggctagagtgatcacagctcactgcaacctctgcctcccaggctcaagcgatcttcacacctcagcctcctgagtagttggaactacaagtatgcaccaccaagcccggctaatttttgtattttttgtagagacggagtttcatcatgttgcccaggctggtctgtgaactcctggactcaagccatctgcctgccttggcctcccaaagggctgggattacagggggctgaattttcaaggcaaggcaagtcccccttttaacttttgttaggtactaggcctgtcatttggtagttgctataaagtaggtggcagcatctattaggatggaatagattcagtagggagacttactaaactgctaatatttatgaaatttagtatgtgatagctatttgtacttcttaataaaatatatttattaaaatcataacatacaagtactgattaaatattgttctagctgagagtcttggttgcaattaataggtataagctctagattatataagcaggaaaaggacttattgaaaggttctagacacagaacctcatctcctccggtgctgaagcccgcggcggggcaggatgggcaggagagcagagccgcggagtctgccgcgcgggtgaagagcggcgcgtaattcctgtggcggaattgttctgcgcctgcagcccctgtgttagcaggatctgaacccgggcggctgcatgcttacaggcgcagaggtcagagagcccttggcttaaagtaagccatcccctcaccttcttcgaggcctccagggctgggcccaagcacccgtcgacggcaccctgggcccagagcactcgcgggcctcatctccaatgattcagaactcacattcgtcactgctgcaaccccaagatgtcagagacacagtg

SEQ ID NO: 13733 - DNA, 2293 bp, Homo sapiens
tgaattaaaggcaatcacaaggagaaacggtcatggtgacccattctgagctgtacacagtgtcctctgtaggattgtagccagaggcagatggctttcctagaaatgcctcaatgttgagttttaaagcaactccttatgactgttatctgaatttaccaaactgtccctggcttttcttaggaatgaacttctgatgttgctgtggaattttctgcctggaaacttattgttatgaaacatgtgactgtaagccacattcctcgccttttatgcacctcacagtgtctatgcaaatgaacagtgtgattttaaatttgaggaagtttcaataagagtgagatctaagaggatctttaatataggggcatttttagagagctaaaaaccaaataggtctcagctttctcagggtgacatataatttagatttgacttggaactacagaaggaatatggggcaaaggacatgagaaacattgcagaggtcagtgccatatggagcttccacctcagctctcgaagtaaaggcaaccagcccaggctgggagccagtcagcagcagggtctcaatctccatccactaccttcccctctggggcagggagggtgttgcagggaggaggccactcttggagacctccagatccctgcctctgtgcagtctaacagaaggggcccccacagtggccatgaatctctttgttctgcaaggaagggggtgtcattgggcctcctgggtccctcagcatctgcgtggccacacaacgcggttttgttcaacacgttacatttctgcttaattaatgttcatttttggtccccagcaaagtccaatctgtttttcgttttctttcttttctttccaggcaggcattgccagggctaatcatctataaaagggcttactttcttaccttcacgctaagcaagaccatccaagggcagtgttagagggcacctgagaacgcaggaggggtgtgttacctggtggcctgtttcttcctcctatgggcagcccttctacaggaagcagaagcctcaggggcgatggtagaaatgaggaggaggggatggagctgaggtagcaggggaggggtcgtaagagcagaggggagggtcttgctttgttcgccatccaataatcagcaggtttcgggttggggtgaactactggggaggagcgccccagggcttctctcagatggaggagggacaggtcacccagagtgaaggaagttgtgagctctgttagaggaaaacagccaggacttagtcaggagaggctttgtttggaaggattgttgtaaggcagggagaggaatgatggcagcaagaggaccccgtgaccataggtctgcaagcacttcaaacagaaaaggcccttcttttatccagtaagggggagccactggggccagcagagtctttggaggggaccctggacaaacccgggaaaatggccagtggggttgagcaggacacaggtcctgctgtgtctagctggttccccagagagatgataaggggtgcgctccagcttctcaggctcactcaggcgtgaggacgtggagctcagggctctgcaggaaggagcgacccaggtgaggtgtggtcaagatagagcagagctgggcagcgggcagtggagcctcgtgggcagcctgggggtggggaggcacagtgcactgggaagtggagaaagtgtgagtccatcaggctggctgagaattgatcacgaacctattgtctgtaaaacttttgttatttcctgagacgtggttcacagcaacccaggtgcgaacagccttgtgattctagggttcttttctattttttaagcacttgcatctacaaataaatttctgagtgacttgtcgtcagctgctttccttgatatgtctaaagacagggcagtgacccgcatcgtcacccagagattctgtctctgtgccacatgaagattaggtgcccgcttttgattgaggagctcctctgttgctctcaaagtatcttgtaataatagctgagatgcatggagaaccacctctccttcaggcgctgctcctcggcttccgtggacgggcatggctatttctcggaaccctctgaggttagagctgtcatggtctttcttctgaaagaggaaaccgaggcttgctggggctcagtggcccttctgtggctgcacagctttcggggtggggccaggactgactgactccacacaaaagtgctcccggcccatgtctttaactcacacggcctcttgcaaacgttcccaaatcttccc

SEQ ID NO: 13734 - DNA, 2291 bp, Homo sapiens
cccatgtccagcataccattattacaatgaacaaatgtaataactaacaacatctgataccagtccattttcaaatttccccaattgtctcaaaaatgtctaaaagcctgctttttcagaaccagaatccaattaagcatttgattgtatctctttaagttttttttcaaatttagaacaatcacccctgaccatttttatgacattgattttccttgatctttatgtcttatcttctataaaatagttgtcttatagaatgcttcacgttcttgatttatctgattatctccttggggttatggttcaactggttcctccagcccagtaaactggagtttagatccaaagccttgattagattaactttcagtattttggcaagaaaacaccattaagtgatgctgtatactttatgctgcagcacactgggaacttcataaaaatgttggttgtccaagggttactgatacacattggataactgggttaaggtggggactgccagatctccccattgtaaaagtatgtttctcctttgtgatggcaagtaacctgtgagatgtgtttggcaacacaactcacatgtttgtagctatctacagtttatcaaacacattcaaacgcacttaatcacaacagcatccctgtgaggttttattcctgtttaacataagtgaaaactgagacttggagtgcttaaataattttctcaaagtaatagacccagtaagtagcaaaagcaggactcaagcctaaatggattaactctagctcagttaaaaaaaaaattaatcccaaatagcctacatctaatagcagattttattttgctctacacattcagagaaattcactagtaatgagctatacaaatgatccctgatagtaaaaattgcagatttttaaagagtattctctctccagaattcaataaatacttcgcttcttttgaaacgattttcttaaaaaggatactttaatttattgacactgggaagcacattggcaaagaaagtcaatttcttttacagtatctaatagctatttctattgcctgttcaaactagcaaaatgtaacagatgctagattccctaaagtacggcgctttaggttacatttgcaacaatagcttacatctaaatgttacattagttactgaatttgtaatcttcacaaatgtgtgaatagtcagttgatcaaaaataacgatttcctgctacaagagaacgcatagcagaaaatgttcccaacacaaagataatgtttgagatgatggatatcccaattacactgatttgataattatacattgaatacatgtatcacaatatcagatgtatccctgaaaatatgtacaactatatcagtttaaagatataaaaaaaattttctgtccaaagttaaatatgtacaactacgatatatcagtttaaagatacaaaaaataataattttctgttcaaagttaagcatatacatggcacctatgatgctaaaaccaagggcctttaggtctggaagagacacataaagtcaggtcctcgcgaatctacttctgaaggggacagaatcggtataggcatatgacagtctagaatcaagacacaaggggtgtggagcgataaagagcaaacagggaagggaactagggggaccatggatccaggaaggggctggaaaagctacttctgggcacccctggaatctgggtatccagcttcgagttagaagggggtccttcaagagagcctcaggcgggggctgactgccgagagttactctgtcctccaggttcttcctaacaagaagctacgaagttcttattcagaaaaacggaacacgacatcacacccacgtgaaaaaaacgcttttaagaggccaagtcactttcacctcccaccaacttgccaaaggctgaaagcaggcggacacgcccccaagcgctcttctccgatttcattggttgccccggcctgctcctcattaggtctctctcactggtcagcaatgccgctttcacagccaattctcagaaccaatcatctccaactattgccccgcctctccaccacgtgagtggcataggtgccaaccaataaaaaaagaaaataaggatgtaaagacgagactccttccctttttcctcaactcgttcagtaaatggtagaaaaggtggagcagctgataccaaccaccaatccatgagggcggaaaaggatgatgagaagagcgatgggagggggtgacgtggcagtgacaggcgcataaactgaaatgaatggcggaa

SEQ ID NO: 13735 - DNA, 2289 bp, Homo sapiens
tctcagaggtgattcaagatgcccctctgcataggccctaaggcagggggtggggactgtgacctggacaggaagctggggcctcaggactgcatctaagctcctccttttctgtgggtgatggtggctgtcaggcccctgaacctacgtcatccctccctctgatttgactgtacctttgctaggcctggtcaagggctagggactcctaaagtcaagagctagggtagaggttgggggttggatctcagggcaccatatggtgcagacttggttgcaggaaagtgacctatttaggcagaggggctctatacaactgggaccacagcaaaccctagaggtgagcacctgcttcaaagactcacagatccaagctgtgatcctagatctacaacttcctggctgtataaagtccagcaagactgaggcctcactgagcttcaatttccttacctgtctaaccagaatagcaacaacttgtttgtatatttgagctcattacatgtcattttgtaaggcactaaagctcctggaggcttccggaacacagaaataattaatctaagaatcctaaagtggctgtcctggtagcacctctagggagtcctcccatcctacgtaacttcctctgggaaagtagaaaacacggcacctgggaaggggcgctgaaccgtgccccaagtcccagtgggcctggatgcccaagagcaagaggaggcccagaggatggggacaggccacgacctgtggcccaagtcccgcccagagggagtgcgccctgagggagagccaccggagctggtgactcgggggcgggtgctctggggtgtcgctttgggttcagcaatacaaatctgccagctggagattaggcggggcacgccggggagaggtgatgcactgccgctgaagacccaggtaggccggtgcgttcggcctgggtgaggaaggcgcgggacccgggtgcgaggactgcgtagcgtccccggctcccgcttccgcccgctttccacgcccacttctgcaagtcccctccggcacctcggcgtccaccggactcctaggggcgagccctcatttccgaggaatgggaccgccttcgtgcccccggggctgccagtccctagactagccctaggggcttctcgtcccggcggagccgggcggtgcctcctgcctgcgcctcgcacctccccgcctggcacggcccacccgggcacggcgccgccacgcgtgaaggcccgcatcggctccctacgtgggggacgtgcaggatgatgcggggtcgggggggatttcgctgcgtcgcccgccccctttccggcgcaggagggagcggccgccgcgtccccgctccccggccgggacgccaccgccgggcgttgcagaggcgcgccgcaaccaatgggcgtggaggaggtgggtcggctggcggctgtcaccctccaggggacgggagcgcggagaccgggagcgcgcgagctgtcgccgcgccccgggccgagggggaggagccgggggaggaggaggaggaggagccgccgagcagccgccggaggaccacggctcgccagggctgcggaggaccgaccgtccccacgcctgccgccccgcgaccccgaccgccagcatgatcgccgcgcagctcctggcctattacttcacggagctgaaggatgaccaggtcaaaaaggtgagcccccgcccgcgccgccgctggtcctggccgcagccttgcgttccggcatccgctcgccgcctccgctgcctccatcctccggcgcccggccttctccgggccagcatcgagttggactgcagggcgcaaggaaagccttcgccttcgattctaccggcattgtcagtgtctctgtgtgtgtgcgtttttgggaggggggcaatcgggcggaagacccccgagaccgggctgcctgctgcagtgtccttgaaacgggccctggatgtcagataggcccccgggctgtgcggggaggtggccggtgggcccttccgcagggcctgttcgggagggtccgagcgccgtgggaggaggtgtgatcatggagatgctggggaggtgatcgagcagcaggcgggggtgctggctggaggccaggcctcccatatttggggttcctggcggagggtgtcgggtgccccggagaagctgtcgccgggctctcccagttgtttgagctgctcgttaatctgaggacgaggtgacccgcccggcttcccggaacggggaggggcggcgaggccaccggaaactttgctcataggcctcgt

SEQ ID NO: 13736 - DNA, 2287 bp, Homo sapiens
acgtggccaagagcaaaagttttaaagcaggacactatggcctgatggacaggagagactagggtccctcctccctcccaggggcctggcttcatctcagaaaaaccgagtccctcttgctccacacccgcatccttagcttcagccctggcagttgtgttgagcagatgctaaggagatggggacattttaccccctccgcagccgccccagagggtctcaaacccagggctgatttagggttgccctgacatggccaaccctattctatgtccaagtgtcattcatggctaaagcaggccagggccccaaggcaaccaagctcctctctcctctgcccgctcccacacaccctcctctgccccagtgttcctatcattacgtcctgggcattgaaacccgggccattcttggaccagggctgtgggctgaatgagggcaggaagaacagggtcaatgggaaaggacagcccagaaaagagaattcaccaccacctgtggtctcccactgctttggtaggaaccttgtaaacacagcagcagcccccaggaaagtcttggaagaagggagaagctgatcagatttagagactgagacatctgggcctccaacccaaggctccccgggccctaaaaagccagactcccgtctccttagccctttccctcaccgaccagcaggtggcaccacaaacagggatttcaaaaccaaaactaaattaaagtggaaactcagatcttttgtttatgcaaatagttcattccctccaacattcctccgggaatggtcccccctccactccacagaaaaccctcccctccctgctgtgcatgacgcgggctccctctgcacacagtgcacgaagacgctgtcgggagagcccaggattcaacacgggccttgagaaatgtgagtaagggtgatgggcaaccaggtgggagggagaagccaggggagaagccagggcatgggaggcaattcagggagacaggaacacccttctctcttcacacacctcatcagttccactgtgcacacgcgtggacacacacaacacacgccccatccctcctcctagggatcagaggagacttcatacatagatgctcatgccatggtcctttcttccctctgggctcttggcagggagcagcgagaggaggggaccccttgcccaggacgggacactctgtgcctgtgtcccccactccacagatggtttctcccagacgctcttgctgaacctgtgggagccctttcagagacccacgggtggaaaccctcaccctccattaactggtcccaagccagtcctattcctggaaggggaggggagggacgcgtccgggcaggggaggaggctggaaagggagtgtgaggggagtgtggtggcctctggactggacactgccctggagagtgacccgatgcagcagctgcacaggccatcctccccacccacgcacccctgctgagaacatgtctgtgaggttcagggtgggcagagaggagaatgcccagtggtatggccgtctcatcccctgccacagccactgcccacatggcaagagtgctgaacccctccagctccagatactctcttttgttttggcaggtggctcttgtacctcctggtgccggccctgttctgcagggcaggaggctccattcccatccctcagaagttatttggggaggtgacttcccctctgttccccaagccttaccccaacaactttgaaacaaccactgtgatcacagtccccacgggatacagggtgaagctcgtcttccagcagtttgacctggagccttctgaaggctgcttctatgattatgtcaaggtaggggcaggatgggcgggcagaggggagacaaaactgggccctctgggatctgggatctgtatggcatgcacacccccagacacagcccagccccacaagagctgatggccaacggcctctctgagagcccggggatgccctggatgggcgctcactggtgtagaggccctcggtgagcactgaggggagaagcacagagaaggaaggggacaggacccactcaggaaattcaacatccactgagtcaggaaaaccttccccatctgctgtctagctgagagtctttgggaaaccactgtgcctcagcttccctgtctccaaggaaatgattgacatggctgcctgcttcaacaggaacacagggacatgaggaggagaaatgtgggctctggcagcacaggaatagccttcagcaaggacagtgtgctcagaaccctca

SEQ ID NO: 13737 - DNA, 2284 bp, Homo sapiens
tcagcgaagcttctggagatagtaccaatatattgaaattgatgctcttttaatacaatgttactaaacaattagaaaatagagtttaaagagagagatctctaattttagtaataaaactaggaggcaatataatgaaagatactcaataaattacaaagcatagtagcacataaagtacctgaataaaataaatataccatgttcatagataagaagacatttcactaaatctctaaatgcaattctcaagttgaataaaatgcccaattgaaatccaattttttaaatggatcttggctggctcatcctaaaatttcaatgaaagagtaaagagccaagtatagttaaggcaattttagacaagaatcattaggaggaggggtttgcaaaatgttttaatacatagagttgagtgcatgggtgttcattatattattatttgtcctttctgtgtttaaagttgctacaattaaacttttaaacttgtagaagaaagaatagtttctgatgttatgttgggaagaatcttgtaagcaagaaagcaaaaagcacaaaattaaaatgtaaaatattattaaattcaaaaagctgtatactgaagcataaagcttttggcaatcaagaaacatcataaaaactggaaagacagtccataaactaagagaagacatttgcaacacatgtaacttacaagagagaattaaactagaaaaaataaatattatctacaaaataattttcaaaagcaagcaatttaataaaaaatgagataaaattaagaacaggctttagcaaaagggaaaatgcaaattaaaagagcaatcagatgctcttatcagcaaaaacttaaaaagtctaacaatagcataagggtaacgatgtgccagtctagtttatgggaaatggacttgtatacagacgaatctcaaaacctctcaaaacctaaattagtgaaaaaaggggaaaaatgaagaatgattcacatatgaaatataaaactaggaaaatagtatttttagggaatcgtacatatgtaactattttcagaaatacaacggaatgagtaatataaaattcagcataatggtgaacggaaggaaggagatgtttttagagagtcttctttctagaagactccaaaaatactggcattttttttttcttaagctctgtagtgggtacctgggcatttttcattcttctttaagatatgcacatgagatatactcatatgtatatttcccaattaaaattggtgtacaaaatctttttaaggagagcccttatgaaactgttcacatcagcaagttctagcttgaataaggacttcctgttactatgtaaccaaacaaaagatagcattttcttgttttctgaagctaatgtaagatggaaaccttcagttgtaatcctatttcaaaagttcttgctcttcacatctgacttatcctcaattatttctagtacttcagtacagatgtgattttatagaatacattcgcaaattaaaaacgccatctccatctgcctaccttgggcttccaagtaaagttctatttttacaaaaatcaaaacagttcctcaactttaaaagtttgaaaaccagtgtacttgtaaagcacttgatgcaagcaacttctgaatgtttcacataaaaacaaacaaaaatgtgtcctctgtaatacagttagagcctcccaacagagcctcagaagaccgtttctaaaggcagtgagttctacttgcagaaatagggcgggagtgcagtctgactccaatccacacgtccttcccctctgacagaacgccccaaaacgcagtcctctctttcttccgcgccgctcccgccctagtcctcttagacccgcgaccggaggctccggaagaccccgagccccgcccgctccgtgaccccgcccccacccgtcccgcccctgaaagcgcccggaacgctgtgcgcgcgccttcggggaggaggggctgtctgggctcggggcgcggcggcagtcagctctatgttcgcggtcttaacctctcctctggccgagtccttgcaagaagtgaattacccgaccctggtgagtagctgcaggagtcagacctcttggaggcggcggcgccagcagcggcggcaggcacgaggtccaccgcgggcgcctgcgcgctcgcccgccagccaatctggtggccgctttcctccgggcgccctttgacccggcgcccctctggcaggcgctggtggcgcccagcggcgagcctgtagccccctcgattaacctag

SEQ ID NO: 13738 - DNA, 2282 bp, Homo sapiens
atttattgcttggcctcatcaaagaaaactgaagaatttgctatgaaaggaacaaaaatgtacaaattgtaccacctcaaccccccaaactgtataaacaactgcaaaattttccttcatctattgatacaaccccagagaagccagtcctcacagacctgggggcattcccatgtcagaatattccataaagatctaggaacacatacatttggcagaaataaatcaattaaggtgcagggaaagattgcccatgaaataatttatggtgatgcatttagtagggccagagagatctgagttcaaattttggctcttccagctactagttttgctaccttaggtatgtcacaatctctctgaatctcaatgtctttgttactaaagtgggtataatgatacccatatctcaaggttagtcctaatactggaagcacaatgctgtgtaaatagaaggtgattaagtgttagctacctcccagtcccttttcccagaaacacaatgcaaaatatttctgctggtttgcatgaatcaaaacaagtggctaaggagaaaaattaaaagggcaagagaatctaatgtattatccagacaatctattaattatgtcgttaatatttaatacgtgttgggtttttggtattattcaggtactgcatctgaatagatcctctcactttgtcttcaacaaatttggcaaaagatgtcattaatcattttattcagatcacaacatgccaacgtaaaaatcatagttttaatgtttactcatgactctgagaaatatagtgacatagaaacagtgaaaaggtaaagaatttgtctctcaaagctgatgggtataattctccctgtctctcgaacctcccccattagtgccacagtgccagcccccataaactgtaagggtgatcaagccttctgaaattgcaggggaagtgggcagcacagaaacagcccttagaaggctttagagacaggtgctcaacatggaattagtgggcttattcagggggttctggaatctgcagtccctgtatgtaaagtcgtggttaggtgtatttcgtgccttttttgtcaggaggctcctcaactatcacttcctcctagaggtcttttttagccatcctatccagccagaggcttcgtctacaaaatctttttcatcactctgtgtgtttcctgcaaagccatactacacctgtcattaccttgtttgtttgcttcagccagtctattccactaaggtaagcttttcaaatgcacgaccctggtccttccccagtgccttgaacctggtgggcctcgttagatatttccggaataaataacaagtccgtgtctatcagatttttaacagactctatactcctccctccatcccgctccccgcccccccccccacacctctcgcgcaagcattcttctccagaaataattttaaggtcatgcgtcttcatttttgaaacgaggcttgggcatttcgaccacacccaccctccctccctcgcatactcgtttcctaacagagcgctactccagcccacttgcccaagcccaccaggccgcagggtttggggcaaccaggggtggggcagccctgaaccggaacaagtgtcaattcacattacccgcactggtcctggttcgaagagcctgggcaggaaccgtgggacccagagaagccacccgcccaaggccgcctccggcctccgccccgccagcagcccagggccccgccctaccggcagccgcgcctcgccgccctccctccagcttggccctaacggctcgcaatggcggaacagggagccaggggcatcgccgcttggggaacctcacccgccggcccagggctcagctcgccgtgtgacagccccgggtactttgcccagcggggtgcaagcccggaccgcggcaagcgccactcccgggcagtcgcggccacaactgcttccgggtgagtgggtcgtcgaccctgtggccccgcccatccttcgcctcctcagtcggccgctcaggctgcggctcctcccggggccggttcccgctgtctcagccgcggcgcagagggcacatcggcctgaccgactagccggctgccagtgccgggagccgccgcgtccatccccgcccgcctggccggggacccaggactgagtcgtccagctgcgcccctcgcccatagccccagcgggcgccgggcgggcgagcagctcttcggcccttcccggacagcgacgcagtcgcagcgcgcgccctaacacaggtaagggccgct

SEQ ID NO: 13739 - DNA, 2281 bp, Homo sapiens
ctgtaatcccagcattttggaaggccgaggcaggtggatcatgaggtcaggagatcgagaccatcctgcctaacacagtgaaaccccatctctactaaaaatacaaaaaaaaaaaaaaaaaaattagccgggcatggtggtgggcacctatagtcccagctactggggaggctgaggcaggagaatggcgcaaacccgggaggcggaggttgcagtgagctgagattgcaccactgcactccagcctgggcgacagagcaagactccctctcaaaataaataaataaataaataaataaataaataaataaaataataatagacaaaaccaacagtgtcacctcagccctccagggcagcaggacaggcaggtaagagcccagccttcagtgccttccatacacaaccgcccaggttcaaatcctggctgcttctcatgtctgcctctcactggctgcttctcctgtccatgccctggacaagggccttcccttctctgggcctcagttttcccattcatgaattgggatgaggatgcttgtgaggatggaacgggattagacgcacagcagggccggaacccgcgaatctctgcagacaggcctggagtctggtgtccactctgccaccctagctgggccacctgggttaatgaggtccccctctgtgccttgttttccctgtctgtaatccggggcttattaatggcccctccctccaggatcatatgtgggactccgggtaaagtgcctggaagagggctggtatacagtaggtactcagtaagtgctggctgctattggaatggtgaccggcacttactgagcacttactgtgtgtgtgatttgccttggttctgatcccaaccactgtctctgggccaggccctccgtgccctctgttctgcgtaattccttataaaaactccaggaaggccaggcgcagggctcacgcctgtaatcctaacactttgggaagccaaggcagatcactagaggtcagaccagcctggccaacatggtgaaaccccatctctactaaaaatacaaaaattagctgggcgtggtggcaggcgcctgtaatcccagctacttgggaggctgaggcaggagaattgcttgaagccgggaggcggaggttgcagtgagccaagatcgcaccactgcactccagcctgggcgacagagcaagactccgtttaaaataaataaataaatactccacgaagcagctactattatcgccgtctttgaacagaggaggaaactgaggcacagcgtggctgagttgctcacccagggccacatattgaggtccccaggttgggttagagctccagttcacagacacagaaagtgaggtcatatagggccagtcgtggcagccctgctggggtttggagccctaggcagcctgactgccaagcttggagctggcctgggagcccagcccccacccttccctccctgcacctgggcaagcccagcctttctgcctagctcttctccctcttcccaggcctggcacggcctctgtggcccccatgaggtcaggagcatctgttgggaagggagcgcctgctggggaagccggcagggcttggagctgcacaggacggcccagggtggggtccctgcctggtcattataaacatgttcagttcctctgtttgtcctgccctctgtgcagtgcccagagggaaggggtggccccaggcaaatatccggaggcgtgccccttgcccccttcccttgggggtttatgggtgggagggcaggaggccaggcgtcggaggacatcccccagaccccatgctgccagctgggccagccgcccgccctccaggctgctcttgccccgtccccaggtgtcccccacctcagggtctgccccgctgtccgccctccgggcttagtgaggggtcacatggctgatcctcttcccgtggctctgggaactgcctagtgccccgcagtggggagggagcgggatggggcggggcgacaggttcacgatgaagaggcctgggctgggcatggggccaaagggggtggagggacatctgggaggacggagaggccggaggacatgggacgcagatctggaatgacagcaggcagagtgggcaaatggggactgttggggtatgtggatgaccctgggagctgggcctagaaagccatgagagagtaggtcagggccaccaggggtgggctgggctggaaggccacgagggaggggtgggcagcactcagggcgccagcattgggctcagagaagg

SEQ ID NO: 13740 - DNA, 2278 bp, Homo sapiens
caaaaagagctttgtgggatgagattttagggcaaagctggggcagtgtctgacttggcggtggtcatgtgtactgatttaggggaaagatcttgaggttttctcaaataattcacctatccccgtgttccctcaagaaaggtcatgttgacctggaaccataggggaaattggtggggtgtgatcagggtcagccccagctgttgctgcccctgcagtgttttgtccagagcacttgcctgcaggtcaggataggatttcaaggccagttcaggagaaagtcccaacccaccagtgcaaccaacaaaagagtaagttttacctacagcctgggttttcacaagtagcatttttattcctcctgctgtctgacatctgagctccaagctctaaacccaacctgtattatatgcagcagcaggttatctttgttttaaatcacatttgttattctgtacttagtcacctttccgtgtgatctgcatttgaaatgttgtaaacttggtcagtatttccattaaaatatcagggctaatcttgtgtatttttttttgttcctaatgattttatagacaaagactcttggcaaccccaggagaaaaaaaataaagctgtcagtggagtactagggatgagaatgaaactggaggtctgtttctggtattatggcttcccgggactctacagtcctgtatggtgaaatacatttttccattgggatcgtcaatgccatgactgttctgccacctcaaactccagagtttctggtgatgtgcaagagttagcaatatacattcagtaaagcgtgtaatcgagtaagtcgtagtaacttgggcgtaaagctctaccaccctgctcactaacaccctgatctccgtccggtatgaaaacacctattccgggtagtctggctccacgttaagcaaacaccactttccgtgttcaccgacagctagagccagaggtctcccggttgctgcttctgaggctgggtctgcagcagctgaggctcccgcctgtcttgccgaatggcctaagtctctgtcttgagactttcgagagttctaatcgtcaaatttcccattttattttgagattttccctgcggcccactatttcggacaacataggagagcctcaaaaacagtttctagcttccaactcggctcaaagttcagacagcagctgggcttccgagagccgccggtgttccaagaaaagctgcccgggactgggaggcgccctctggacgccggaacctttggtttcctgccgtggagcggaacggtagcgccaggggccttccggaaagaggagcgagagcccggcgatggcggctgcgccggccttgaagcactggcgcaccacgctggagcgggtggagaagttcgtgtcgccgctctactttaccgactgtaacctccgcggcaggtgtggcccctggtcccccgcagccggccgaccgcaaccgtgcgcctcaagctttccttccggggagaaacctaagctgcagccacccgggccgcgggacaaagtgcccgccgcgggcagggcaggggccggggaggagggggtagggaatggactgtgccgcggagcggccaggcagccctcttggcggaggatccagggaaagtgcggccccaccggccagctggcccccaggcggaaacggggcggcctccagcatgtgcccaccggcccgtcccacgcaggctttttggggccagctgccctgtggctgtgctctccagcttcctgacgccggagagacttccctaccaggaggcagtccagcgggacttccgccccgcgcaggtcggcgacagcttcggacccacgtaggtaacgcccagcgggtgggcggggccacaggcctaggggaagtcccaacccagctcccagccacaccttcgttgtctgccctctgccgtagacaactacgtgggatcgagcagcaccctctgctgggagcagcaccctctgctgggaacagctctctggtccctgggtcttcaggggatggttttcattcccacgtggccgcctctggacatcccttaggaagggcaccctagggatcacgaacctttgacgcctctgcctgtttccctcatcttgcttctcaccttgttgctcctttcttgtgactcaaagctgagtaccttgtgacactgcagatgcttggagagtttcaagcccctgccgacactttatccaaggaaggatatcaggataggacttctacctctaggcctatcacaacagctctcttgca

SEQ ID NO: 13741 - DNA, 2278 bp, Homo sapiens
gtgtgtgtaaagaaacaagccccaggctgggcgcagtggctcacgcctgtaatcccagcactttggggggcctaggcaggtatatcacaaggtcaggagttcgagagcagcctgaccaatatggtgaaatcccacctctactaaaaatataaaaaattagccaggcatagtggtgcacatctgttgtcccagctgcttgggaggctaaggcaggagaattgcttgaaccagggaggcagaggttgcagtgagccaggatcgcgccactgccctccagcctgggggacagagtgagactgtcccaaaaaaaaaaaagcccccacgcagactattggtgtgccctggaactgagcattagctgttccctctccgagttctctcccctacttccccagccttccaggctgggctgtgggtcactgcctccgaggagccctcctggattctgctgaagatggtcaggcccctccatccccccattttctcttatgtacctgacagccctgccttaaaaaaaaaaaaaaggtagagcaggaattcccatttcacaggggtggaagccgaggcttggaggagtcaggactggtgcctgagttctcgcagtcaggaattgaccgcgctgggctgaacgcctctagggcaggttggggactgggtgtgttttctgggtggacatacccaggtcccggcgcggaccttggcctcctcatctgtgggcttagataaaggcctcccagcctcctgttcaccagggttgtcaccacgcagggtctgactcacctgcctggagctatgccggttcccagcccaggctggcggccgtgttctgctgggacctgggacctgggctgcctgccctcctgaggggtcccagtggtcggtcgcctgccttctgggtgggtgtggtagagggagggtcaggtggccccctgctgttggggggcagtcgctgtgggagtgagtcgtccccccgggccatagcaggtaggtaggaggtgctctggcagttgaggccgccctggcctgggacagtcaatcagcctgaacactgtgcctgttccgggattttgacctgccctccaagggcgcggcgggcccagcctgcagtgtcccggcagctgcctcctctctgggtcgtttgtttttcatcagacagaggttgtactcttggagggacaagcgaggctgtgtttgtcttttaccctggagacagtggagtgtttgtggcctagcagggccgtgcgggcctctcggtcctggtcgcgcgtggtgtgcgttttgggagggcccagcgagtcggctgctatgggccccacctggcacggggcctcgggcagcggcagcacctggcgctgcctccgcgcttcctgctcccggctcccactgcatctccggttctgtgctttgttgaacgcgtgagcttcgggcagcgctggggccgcttcagcgtgacctccaaggccactggcctggagttccactggctgctggtcccccatctgtggggcgccccggcggctgaggcgtggaccaggcagtgcatgtcgaggagtagcacccacagctgcgcggctgcgaaatgatccagagacacatccctgtctgcgggaggagccgtccataccagcggggatgtgtagtccaggctggcagttcaggatcacccggctggagtcattttaagatcatctgcggcttagccccagcaccatctgaggcagtactgtctgctagaaataactgtgagcacacaggtagtaaggtttttaggattttattattatttatttatttgaaaaaaggaacagggtctctctatcttgcccacgttggtctcaaactcctgtgcttaagtgatcctctcgccttggtctcctgagtagctgggactacatgtgcacaccaccgtgcccaactaatttatacttttaagcaatgtgggctgggcacggtggctcacacctgtaatcccagcactttgggaggctgaggcaggtggatcacctgaggtcaggagttccaagaccagcctggccaacatggtggaaccccgtctctactgaaaatacaaaaattagccgggcgtggtggcatgtgcctgtattcccagctactaggggggctgaggcaggagaatcgcttgaacctgggaagtggaggttgcagtgagctgagatcatgccactgcactccagcctgggcaacagagtgagactctgtctgaaaaaaaaaaaaatgtgggctgggcatggtggcttacgcctgtaatccaacctca

SEQ ID NO: 13742 - DNA, 2274 bp, Homo sapiens
cagagaaagcctaaggatggtgaacgctcactctacctcccttgtccctgcaggtcaccgaagtgaatttgaacaacatgctgtgtccggccatctcagacccattctacggcccctggtatcgcatctgggcctcgggacaccagactctcatgaccatgacccacgggaagctggtcatcctgttctcatacatggctgggcccttgtgtaaatatctgctggatttgctccggcttccagccaagaaaatagactgaaggtgcttattttttttttttttcctccctgaggaagcaagtcgtgacttgacttggagaacacccagttcttgataaaatcatgggagagggcagtaggatgtttggtgtatttctttttcctcctttctgtccctttcttctaccactcttcctttcccagctcttccccctacgatgtctccttgagcctggggtgtagtgctgggcgctggattttcctccttccctttggctctctctctgctcctagtggccttacatggggagattgcagtgagcggctctttcactctgcttgtcggtgctttaacaacagctggttgaggagaaagggaacaacaagtagtagttcttttggcatcgaagcaatgagattgggttgtgtttcatttctccactgccagggacctccaggcttatgctggcgtcccatttagtctccagcacagcccttaccacgggggactgaggccttgtttctataccagcggcaagcccagagccgagggatttcacagctcgtggtcaagacagaaccagccagattctggtcactggtgtcccatgactcaaagtaaacagccaaccagccactccctccaggatgctgcctggggtgggaggtgagagcaccacccagcccaagggctagattccattgagagggttggagatctattgcaatgacaaatccaaagtgaagagggtcaagatatatacagtactaggccagaccctgtgtaagttctgcctgtgagagttgagaactgatgcatatcccaatcagaagtgagcacagaaaactgtgatttgaatcatacactctgttttaggaaaatgttgataatagataccattttaatcttgagtgccccttaaatgtgttccctctccctttccctctccccccacccctccccctcccccctccctccctctttccctctctcaggcagcttcagggaagaatgagctggaattggctggttggttggtttttgagtttggagaatcctcgcatcagggcccatttctggaagattctgtagatctgtttcttggttttacagggccagtgttgtttccctagggccagatttcttcagtgtatccacactcagtgctgaattgtttaatgtgggggacatcacgtcctcctcatcctgtctacccccaaatcccatgtctaggttgaaagggggctgccaaagaattaagtcctcatgggtggaggttcaggtgctccacaaggaggagcttttgttgaaggacttcagctcagttatgcacggacctcaagcaggcaggaagtggctgggcattgctgactccacattgactcccactaggaacagatttgcttaagaacagaaaagctcatttggtgattttgtctgatgagcctcccttcccctgtcccactctaggcaacacagttgacctagaccagttccagtatttccagtttgaccgtgtttgacctacactgagcttcggtgcctcagtggtcataattttagcaagtggacctataggaagcaaccctgggagggaccgtccttctgcagaggcctgcgggcattgaggctatcaatccccagggcttggggagcaggaggggagggcaccaagtgctcttactctcctgagctccttttgatgcgtaagctttgtttttggccctctttgaaggcagggccaaacttttcttagtgcctctcaccttagggtggccctccagggaaggtgctccttgaatggctggattggccctgcccaccgtcaaactgctacatgtaggaatagctgatgaggaaatacacaaggcctcagtgccccttggcctctttacaaaaggagaagttggaaggggattgtgggaggagcccctgggggcctggtctgtcctccaccagaacttggagttgctgccagcagaggatctgtgcctcagctgaagactagctccggaatgtcataggggtgtgactgtgtaggccttctcctcctc

SEQ ID NO: 13743 - DNA, 2269 bp, Homo sapiens
tttcttactgggaggaccaggatcatcatcctattttgcatagaaggttcagtttgttctttcccttaaaataggaagataagggcattatccccctaagtctcgtatgatattccccattctgagtccagaatacctagaaatttggaatttggctattgccgtgtctggactgtgagtatgggaaggggaagcttttctgtctgttgtccccactaccgcccctcacatccgtgattctgaaccccatgataaatgccctttgaacctttttcctccttttgatgccgaatccccttttatgggactccgccagcacgggtgcatttaaccttcctgagcttgcccacctgacgcatgcagccaagaagctttgaaagatggagtgccctggctgagggttccaggtctcagcaaggccacgaggtggtgactgcctcccagaactctgttgggccaccctccgtcctggagacccccaaaacctccatagcaccaactctgcccattcacacacacagtcagccctccctcccgagtccaccgcgggcagagggccagccaccatgcctcccatagccgccatccctgggaaggagccctgaccccgtccttacacccctctacactcactgcctgtggggagagctgctcgctgtcacaagcatccagggggctgggtcgaggggccccctgcatggtgggggaccatgttgtcgtgcatggaatgaaactggccacacataacagatatggtggcgctctggtcggatctaggggagtctgtcctacaggatgaggcttgaactgtcctgagtgaccagacacccagcctctgcttcgagtgctcagttatgattattgtcctgatttagttaactgttcttcaggggctccaggaggacgagtgtgtatcctcccattgctctgtgcagcctctaacctctagagtctaggggtctggggagaagttgggaagtctggccagtggggccggtgcctggtgacctcgggaggtgggatatcatcatcttcagaactgtagttgttactgggataccagctctgggagaccacaggtgcagtcagcacagcaggaccttagacaaggcacccagccccagtttccccacctgggaagggggctacttgtggctagaagcagcccggactcctgagcaagactagaccaagaggccggtatgtggacacccccgcgtgggcacccccacggggacaccctggccaccgccgcgcggacaccctcacgaggacaccccggccgcgcggacacctaccgcggggacgccccgaccccatcctacctgctgcgccccgcgccgcgccccgcaccccgcccgccacggcctgcgtccgccaccggaagcgccctcctaatccccgcagcgccaccgccattgccgccatcgtcgtggggcttctggggcagctagggctgcccgccgcgctgcctgcgccggaccggggcgggtccagtcccgggcgggccgtcgcgggagaggtgagagcgctggctagaccggggccgaatgcggccggattcggggcgggggccttcagacctagggtggaacactgggatagggtgtggggaattcggaccgctgtgaagtgatctgacgttgggtgggagtctccggacttggggtggggaatctggatgggaactggggaattcggaccttgggtggggatctttggaccggggtggggtccccagactccttgtggaaagctgaggttgaagatctgtgctgtgatgaggggctccagatagcggtgagagatcccgcttcaagactgggttgggggtccagaccaggaggataagcctctccctggagtagggcttgacctggtgagggtgtggtagagtcacaggggagggtcccacttggtccttgggctgggatcagactctcagagctggagagttgcaggaggcctgggggagggtctgtggagccccagactcagagggccttggtgacttctccaacaggctccctgttggaggccttggggtaccccagggcctttccctgcaagagagaggctgctccaccaggaaggggcccaggactccccagggtcggggggatgtgtggtgtgcaggaccacgtgggaatgttagagaaaggggaagtcactccgggcctgccctgctaacagacctgctttttggatttttccagccagggatttttgtgtcctgttgctttttattgtttaaagtgaccctccaagc

SEQ ID NO: 13744 - DNA, 2264 bp, Homo sapiens
gatgacccgaataatctctgcaccagatctgtgtttgtctcttccctgctgtaggtcgctgtggccttgcccctcagaacaacagagcaatgggctgcggccaggcagcgctctgcgctttgatgaattttaaagcgttggagtgatcacaggatgtccgtccgagtttcacagttagcgagctgctgagctgagccgagctgagggttggcagggtagagtcctatgggagaaacactgcttggatcacagagatttctgtgtatcaggaaccaacaaatactaagtaagcacttgctgtggctaaatgcttaccacatcggctgagtagggggtgtgcagatgggggagtcccacagcccccaaaaccagctacaacatccacgttttactcagacaaggggccctcaagcaccacctcatgccgaagtgctgcttcacgtgaatagagctaggattctaagccaaaaggcctttctagaactttctgcatgtaccaaagaagctgcttccacctcactgcctcctttccactgttagtgttctgctgaggcttctcttgggctctgcctctccctgcccaacacctgagaaaggcctgatcagtgctggaggcactgggtggcacctctcctgcggacgtgcttcccacgtaaggcaggtatagggagacctgcctgtctagaaagacatatgtttacatgtcagagagaaacacaacacctgcactctctaaccatttcctgaaagacccctcttgacacaccttaggggcttcagggccacactgcctggcacagctggttcccagtgtggacctgtctccactgccagcccctgccccaccctctccacctgagtcctgatccctggtgaccaagagaggctgtgctgcttctggccttcacagtaagccagatggcctgggaagcgagactctctctgcctcccagcactccaggctgcagttgctgtttcatcatccatgggtgtaaaacaccaagcaagtgacatgatacagaatgacctccctgtgctggcagtggcaccacagaaacaggaagactcagagccagaagctgcctgcgcagattgccattatggagcctgggaaatcaagtcctagaaagattatctgtttttttttttttttttgagataggagcttgctctgtcgcccaggctggagtgcagtggtgtgatcactgctcactgcagcctctgccttctgggctcaagcaatcctctagcttcatcctcccaagtagctgggactacaggcatgcgccgccatgcttggctaattttttaaacttcttgtagagacaaggtctcactatgttgccctggttggtcttgaactccttggctccagtgatccgcctgcctccagtgatcctcccacctcggcctcccaaagtgctgggattacaggcatgagccactgtacctgtcctagaaagattaaaggatacctctacgtctacctctacctctacctctacctctacctctacctctacctctacctctaacctctaacctctaacctctaacctctacctctacctctacctctacctctccccacggtctccttccacggtctccctctgatgccgagccgaagctggactgtactgctgcgatctcggctcactgcaacctccctgcctgattctcctgcctcagcctgccgagtgcctgtgattgcaggcacgcgccgccacgcctgactggttttcgtttttttttggtggagacggggtttcgctgtgttggccgggctggtctccagctcctaaccgcgagtgatccgccagcctcggccttccgaggtgctgggattgcagacggagtctcgttcactcagtgctcaatggtgcccaggctggagtgcagcggcgtgatctcggctcactacaacctacacctcccagccgcctgccttggcctcccaaagagccgagattgcagcctctgcccggccgccaccccgtctggaaagtgaggagcgtctctgcctggccgcccatcgtctgagaggtggggagcacctctgcctggcaaccaccccgtctgagaagtgaggagcccctccgtccagcagccaccccgtctgggaagtgaggagcgtctccgcccggcagccaccccgtccgggggggaggtggggggggtcagccccccgcccggccagccgccccgtccgggaggtgaggggctcctctgcccggccgcccctactgggaagtgaggagccc

SEQ ID NO: 13745 - DNA, 2261 bp, Homo sapiens
tgattttgtgttctgtcctccctggcctcccaaagtactgggcagcctcatcataattgcttaccaccaatgtctgtgttgtttttgacagtgccattaggcatgaacttttccattctttgttctaaatatagtcggtcttagaaattgctaaggggctctgtgttcttacagcctgcttctccagcctgtgcagaacctttgtgccattgttctggagctggggctggggacagcagcttgattttcttatagttatatctgttctgtgagtggtctactaggccatcaatgtacccatcagtcttctctgtttggagcttcttggcctgcatggaacctctgctttacaagaggtgaggcaaagatgatctgtgcttggtgtccttggcctgatgcatctggggtagagcttctgccctaagaatggggactggatgaaagagaaaggattcttcagttctctcatctatctacacttgcctggaatagaatttctgcaacacagagctaggggtaggaggtgaaaaatgctggctgcttgcgtcacttgggaagaaatcgtagtcctggatttggagctgggtagggttaactagttactagttagcttcagttttgtttcttcaagaatgatggccggatgtggtggctaacacctgtaatcccagcactttgggaggctcaggtgggagaattgcttgaagccaggagtttgagaccagctggggcagcatcatgagagcctgtctctacaaaaaaaattttgaaaaattagctgagtgtggtcacacatgcctgtagtcccaactgtttgggaggctgaggagagagaatcgcttgagtccaagagtttgaggctgcagtgagctataatcttgtactgtactctatcctgggtgagatcctgtctttaaaaaaaaaaaaaaaaaggtattattacccacctgccacacaatggctgttcccctctgcccggagtgctctttcttacccaaataggcacatggtacgctctctcttccttatgagtctctgttcagatatcacttagctgtagcacctctccaacgttgccccagtcactttctattttccttacctgggtttattttcctcataacatttatcaccatctggcacgtacacatgcatgcatgcatacctacatatttgcttgtctacctctcccagtgaacgtgtaggttgcacgagagtgggaacttaggccgttttgtttactgttactttcgcagtgcttagaacgatatctaacatagtggattttcaataaatctgatgaatgcaaagtacagaatgaccaaagtatactgctttcttgcgtcatagtttaacctaacttgaaaactatctgtagagccattgtggaaaatgaattttttgtgtttgcaaactccagttgcttgttgctgactagagtgagaatggggctcacagggaaggaatgtggtgattatttggcagtggctgctggggctgtgagagaggatggatgtgttgtatttgtaaagtacttgccatccctaatgcagtgagatgctaaagcacaggaaatgggtaaatttttggtcttcccccaaccctctttctgacttgctccctttttactactgggaaatgtttgtggatacttaaggttttggttggaacagccgcctgtttacagtatgatgtggaaacttttcttgtaattccgttgttaatagatattgtacaaatgagtctcttagaaatatcaagacattgtaggggaccagtgtggtagctgctgcctgatagaaaaaaaaaaatcttcatttgccgatgtaacttttctttaaattattttaaaatgattttgaactaacgcctttctttttcttcctcctagattctcgctgaagtctgttaattctactttttgagtacttatgaataaccacgtgtcttcaaaaccatctaccatgaagctaaaacataccatcaaccctattcttttatattttatacattttctaatatcactttatactattttaacatacattccgttttattttttctccgagtcaagacaagaaaaatcaaaccgaattaaagcaaagcctgtaaattcaaaacctgattctgcatacagatctgttaatagtttggatggtttggcttcagtattataccctggatgtgatactttagataaagtttttacatatgcaaaaaacaaatttaagaacaaaagactcttgggaacacgtgaagtt

SEQ ID NO: 13746 - DNA, 2258 bp, Homo sapiens
tagtgtgaacatcgttgccttgttttcttcaatcagctcttaaaagaccatgtatataaaaagtatttcgaaggacagaaataactctagtgttagacatttctggacatttagctggcaagatgagattatggcccctcttatgcctagtaaccagaataacaaacaaatgaaacttcagcaaaaaagggtaaaagtacaaatgtgattttatagtagttcattaaaaacattgagctggacctcagttctatcttttttctttaaaggattgctaactaataattttgctctttactcagtcattcatctatgacttatagaatgcctataatattccagacattatcttaggttctttctcattttttactatacccatgtgaaataggtattagcttcatttcataaaaggacattggagtttggagtggttaaatgacttacccaaagtcacacagttagtaagcgtagactgattttgaatctgggtctcctagtttgaattaataagtgctcaataataaataataactaaaggttatttagtgtttactgttttacatacttcatttatatcgattggtttaatacaaccaccaaatggcattttcatctttattgtctgttttttatagatgagaaaactgatagcacaagtagcttgccaaagatcacaagcaataaagctgaaattgtcttcagatcccatgattaagaaaccaatcactacactataaaccaatcactacactattcttctttcaaagaaacgaaggaagttctaggatcatgagagatggagagtattcaatctcctgaatgtaaatctaccagcattacttaccaagtttaagtttttctgttgttacttgaggcagtgggtgattatgcaattggtaaagggaatgaaaaggcctttgcacccaagaaagtagaagaaaggcgcctgaatctctttatgataggtggtatgttaaatctaggtattttcgtatttcaacatattccacttcttgcaaaagctgcaaaatgcaacacaactttaaatgtaaacatagcttccaagggcacagtgctgaacatataataacctgtgtgtgcacacccacactaggttatgtaacaggactgtaaacactggtcctggaatggcctgggaggtcatctaggtcctccaccatctttctgcagagtactgaggcctagcgacgttaagtctgcaaactcacaaagatgaccccgggcttatactaccttaggttacctactacctttgcttgcatttcctctctcctttcctgtctgtttgtgcaaaagaaaaaaggcctggcttcgccttcttgggagccaaaacacaaccaaacagagagcgagtttggagcccggccaggcatcttgtgaactgcacacaaaataactagcccaaggtcagagagcgcgccaggcccgccctgaaagtttctccgcaggaaaatccaccgccctttcccaaccacccgcgtgggtggctcggaaatccgccaccctggggacacagctccctgcccatctctgtggcccgcttgtgccccgtgccgctgggccgactaagagcctcgggctcgcacctcccagtacaacctagggacgtcaggggtcctgggacccacgagccgctctctgccggccggctcctggcccctcctagcagacccaaccgacatccttcaccctcagttagtgcgcaggagggaccgggacgccagccgactgcgctccagaactattcccattgggccagagaatgagtgacgcactaggccccgccccggcccggtgggttactcctttcatgcccggcccccatccctagccccgccccggcgccccgggccgcggccgcctccgcgtccgcgtcgtcgtctgtgctcccggcgctgacgtgtctgggcggtcggcttccactccttcaggcgtcggcagccactagtcgtggcgagaggggcggggtggccggggctggcgctccacttggcccccgctcccggcccgccccgccgccgcggccccccggatgagggtatatattcggagcgagcgcgggacgccgatgagtggccgcgcggaaggagctggagacggtcgtagctgcggtcgcgccgagaaaggtgaggggctcccagcccagcgaggagacggcggggctcgggacccgggcgggcggagggcctggccccaccgcacacacggccacgcgctcagacgtggacacgcgt

SEQ ID NO: 13747 - DNA, 2258 bp, Homo sapiens
ggttgatagctcccaagtgatacagttttaattctttgaaaaaagattaaaaaatcacaatgtacctaattttgaaagtaaagctaaattatgaatgtaaaggacttcccattatgacctttgtccccaactcatgagtgtgtatatgtgttttctttccttttttgacatttaaaaaattatttattttttagagatgggatctctctgttgcccaggctggagtgtactggcatgatcacaactcattgcaatctccaactcctgggatcaagagatcttcccgccttagcctcccaagtagctgggactacaggcatgtgccattacacctggctaatttattttattataattgttacagccaggctctccctatgttgcttaggctggcctcaaactgctggtttcgaactcctggcctgaagtgattctcctgcctcagcctctctaatagctgggattacaggcaagaaccactgcaccaggcaactctttttcttttttgtttttttttgttttttgtttttttgtttttttgtttttttgttttttgagacggagtctcgctctgtcgcccaggctggagtgcagtggcacgatctcggctcactgcaagctccgcctcccgggttcacgccattctcctgcctcagcctcccgagcagctgggactacaggcgcccaccaccacgcccggctaattttttttgcatttttagtagagacggggtttcaccgtgttagccaggatggtctcgatctcctgacctcgtgatccgcccgcctcggcctcccaaagtgctgggattacaggcgcgagccaccgcgcccggcctctttttcttttttaatgaaataatagagctagtagaaaatagtttgctttttaaagtgcttacttaataaaataaaaagtgggcaactcgaaataaaaaatcaaacaatatctaacatgtttaaaagatttttaaaaatcaaaatataaaataatatcaaaatttaaaaactgggattctgttccccaaagttctgttcaaatctgttagatttatcttcccttgaccctaagtaatatcttgggcaagccctagagcttctttcctgacccttagttaataagatgttatctggtcacattcagtcacaataatagactcattttagtaataaacatcttaagactagtaattaaaactctttacttcacaccaagtttcctccccaagcttggcctgttcctggctggcagcctgaagtagggaaaggagagatatggtgaccttttctttgtacctttctagctaccctctataccctgaccctacatacataattgagctgtggcttctgactctactgggtttggggatgagaggcattgagagtaaaatgaaggagtggttttaattaatggcacagctaaaactggattttgttctctctgcacatggcagatgtttaaagctcattctttcttttatgcaagtttttacaccatccagcctcatttgtacctcttgaatttttgctcagtggcctatcaccattcaggatcaagacaaaaatcaatgagcacttattgtgtgtcatgcaccctacaaagtgccaggatatttatccaaactcctggcaatgctaaacacaatgcaaaaagacatattagaaaacgaatcttattaactttaacttttcaactgtatttcatcataaagtcttactttacaagataattgctgttgtgaaaaagggaaaggtcatggtctcatttcccagatgttatttgatatatgctataaattatattacctccaacatagtctgcactttgaacttagaaaaacaatcttcagacggcatgcattctaattcttgaaataagtatgcccacaaactgtaatttaagacagaataggtatgcttctcatgttttaattcagttgaatttcagaagatctcaggaatgtacagaacgagaattaagaattaattaataagaattaattaattgcttgacatagttaggtgatttcctgaactttaagcttccacatcacagtatgaagttggttctaagataagaaatataataaattctcgcccaaggacagacctgaatctctagctgcctagaggctgactcaactgaaatcatggcgtttgacagcacttggaaggtagaccggagtgaaaactatgacaagttcatggaaaaaatgggtaaagactttatttctttgtggctcattctttgcttt

SEQ ID NO: 13748 - DNA, 2251 bp, Homo sapiens
tccttgctttgcaagttgatacactggcatattccttaagtcaggctgaatcgggtatgggcgacctggagctgaaggcattccacttcattcacatttaccaccataaggtctctcaagctcactttcctcggctgcaggtctaccaacacttcccaagctccctgctcctcttcctgggttccctacaattcattttacttaaccaataagaactgggtgcccgccatcatcccaagctctgttttagacatgcagacagggaatgaaacaaagttgctgtcattgcggaccactgaaggaggcatatgataaacaaaactatcttctgaataaatgaagtaatgaataatgcagtgtaggaactctatcaatagcgagtgaaaagcttattatctacagactatcacaccaggggctggtactcacttaaacggcactaggaagtgagtgtcagatgctgttccggcagcccttggcgtctaacaaggtaaataagacggggcctgtcctctggagcccagaatccaggaagaaaggcgcacatgtattgagcgcttgcttttcaggccccgtggaagtgctttacgggaaccatctcatttaatcctccctgactctaggaggttctcccaggagagaccgctccagacgacatcaggcctacaagccaagaaatgcagcaggcctctagaaactgagaaagacccccagatgacagccagcaagcaaatgggggccttagccctgcaattgtatggaactgaattctgccattgagctggacgtagatccgttcctagagcctccagaaaggagtgtaacctgccaacgccttaattttggcttcgtgagattccaaccagagaactcactaagccacactgcgacccggcaggctgggcagtgcagcgagctctggagagtgcgccctgacccggggtccaggcccggtcagtgtgaccttgcgcgagtcacggtcgtcctccgcccgccaggccccggacggcgtctgcagggtccgattcctggggatttcccgacgccccttcccccgaggttcaggggctgcctggggtgccggggaggggggccgagggatgggggacctggggctagaagggtggcactgagacccgtagggagggggccagtgaagtgagtaaaggtggatcgacgaagaaggaaatccttggggagagaaccaccgacgcgcgcttctttcccccccccgccccgcctccgcccccgcccccgccgcgccgcctctctcccgcgctccggaaggcctgcgtccccgctccccagccaggcgccaccacctgccgcccaggcagccaggcgactcttctttcgcgggtcacgcggcctgactcaggcccctgctcctgtggccccgaaactcgccgttcgctgggccttgcgttgcactcggcgtgcagttccccctcggctcgcggccacttggtccgcgccgcctgcgtcctgtgtgccgagcccgcccgcactgcggggacaggccgggcgccgcccacgccgcgctctgccgggcgcacagtctgcctgggaagcgcgcggccgggcgggcggccatggcgcggcacgctgggaggtagcgcggcggctgcaggagcgcacagtcggccatggcccggcggcggcgccgcgcctgcatcgctctgttcctggtgctgctcttcgccttcggcaccctcatgggtctgcgcacgctcaaggctccggacggactcccggcgctgggcccgggcctggagctggcgccctttgagcgacgcccagagggggcccccgcgcccgctgccagggccccggcagcccctgccgcgccgcccccgccgccgccgccgccccgcaccgcggaccctggcggctcccctgggccggcacccgcggaggccgagcccgcccccgtgcagagcctgcgcgtctactcggacctgcacgccttctactactcgtggtacgggagcccgcggcgcgagggccactacattcactgggaccacgtcatggtgccgcactgggaccccaagatctcggccagctacccccgcggccgccacagccccccagacgacttgggctccagcttctacccggagctggggccctacagctcccgggaccccgaagtgctgcgggagcatatgacccagctcaaggaagccgccatcggtgagcgccccccaccccgggcggccctgccccccagcctcacccttcctccttc

SEQ ID NO: 13749 - DNA, 2228 bp, Homo sapiens
ttccctcaaacagagagttccaggcaggatgaatctgtgctctgatccctgaggcatttaatatgttcttattattagaagctcagatgcaaagagctctcttagcttttaatgttatgaaaaaaatcaggtcttcattagattccccaatccacctcttgatggggctagtagcctttccttaatgatagggtgtttctagagagatatatctggtcaaggtggcctggtactcctccttctccccacagcctcccagacaaggaggagtagctgccttttagtgatcatgtaccctgaatataagtgtatttaaaagaattttatacacatatatttagtgtcaatctgtatatttagtagcactaacacttctcttcattttcaatgaaaaatatagagtttataatattttcttcccacttccccatggatggtctagtcatgcctctcattttggaaagtactgtttctgaaacattaggcaatatattcccaacctggctagtttacagcaatcacctgtggatgctaattaaaacgcaaatcccactgtcacatgcattactccatttgatcataatggaaagtatgttctgtcccatttgccatagtcctcacctatccctgttgtattttatcgggtccaactcaaccatttaaggtatttgccagctcttgtatgcatttaggttttgtttctttgttttttagctcatgaaattaggtacaaagtcagagaggggtctggcatataaaacctcagcagaaataaagaggttttgttgtttggtaagaacataccttgggttggttgggcacggtggctcgtgcctgtaatcccaacactttgggaggccaaggcaggctgatcacttgaagttgggagttcaagaccagcctggccaacatggtgaaatcccgtctctactgaaaatacaaaaattaaccaggcatggtggtgtgtgcctgtagtcccaggaatcacttgaacccaggaggcggaggttgcagtgagctgagatctcaccactgcacactgcactccagcctgggcaatggaatgagattccatcccaaaaaataaaaaaataaaaaaataaagaacataccttgggttgatccacttaggaacctcagataataacatctgccacgtatagagcaattgctatgtcccaggcactctactagacacttcatacagtttagaaaatcagatgggtgtagatcaaggcaggagcaggaaccaaaaagaaaggcataaacataagaaaaaaaatggaaggggtggaaacagagtacaataacatgagtaatttgatgggggctattatgaactgagaaatgaactttgaaaagtatcttggggccaaatcatgtagactcttgagtgatgtgttaaggaatgctatgagtgctgagagggcatcagaagtccttgagagcctccagagaaaggctcttaaaaatgcagcgcaatctccagtgacagaagatactgctagaaatctgctagaaaaaaaacaaaaaaggcatgtatagaggaattatgagggaaagataccaagtcacggtttattcttcaaaatggaggtggcttgttgggaaggtggaagctcatttggccagagtggaaatggaattgggagaaatcgatgaccaaatgtaaacacttggtgcctgatatagcttgacaccaagttagccccaagtgaaataccctggcaatattaatgtgtcttttcccgatattcctcaggtactccaaagattcaggtttactcacgtcatccagcagagaatggaaagtcaaatttcctgaattgctatgtgtctgggtttcatccatccgacattgaagttgacttactgaagaatggagagagaattgaaaaagtggagcattcagacttgtctttcagcaaggactggtctttctatctcttgtactacactgaattcacccccactgaaaaagatgagtatgcctgccgtgtgaaccatgtgactttgtcacagcccaagatagttaagtggggtaagtcttacattcttttgtaagctgctgaaagttgtgtatgagtagtcatatcataaagctgctttgatataaaaaaggtctatggccatactaccctgaatgagtcccatcccatctgatataaacaatctgcatattgggattgtcagggaatgttcttaaagatcagattagtggcacctgc

SEQ ID NO: 13750 - DNA, 2189 bp, Homo sapiens
tttctatgtcagaatggggcagtcctgcaaacacaaaagacagatccccggccctgtctcttcttcctgtccccttctgtttccccattgcatctcctttccccttgctctgcctcccaagcctcccccaccctctcactctttctctctctctgcctctttagcttttccatgagagggacaagcactggggaggaagttgtatttgtgaaagtgaccgagttgtatacgattgtgtgagaagagaagaaagggtgcatacagaagccctttgaatgctccctaaaattccccttttccatcgtatctcttgggatgagagagagactgggctggtgacggaatggtggcgcagttgtaacatggtcatcagagttcatctaccagcatctccacttacaagtttgctttccaatgatcaccagctgaatgggtttccctacagcaaagatatttcttttaaaataccactatttcaagagtgtttggacagggttataacaaaaaccataggtattggcatatggttttagatttccctgagcactgttacaaacctagtctgaattctcacaacagcccgctttacaccaggcaatggagtcctagaggcctggcactcagaactctgaccgcgtgtcttctggttctaaactctgtcatttctactctgctccttccaagagatttttgcccccttttctctaaaaattggagagagatgagcccccaaaatggaagaactaaaatagcaatagctactctctttgcagggcttagccaaacccctaggcaaccttccccctgctggaagtctctccctgtccctcccaatcagagtggcccaggtcccacccaggggactggccgaggctcgcctcctccagacagtgttcccattgtctgcagcctgcctgatgtcccactccccagggctggccaccggttttcccaatcagctaatcagatccacagatctctgacaaagggcctctgcttctgcaagtacaagggctaaggacgagttgtctctacttttccagataatacagtagctttctggaggcaatgccttgcttttctctgttatctcaactacatgactgaagagggaaagaggcctgtggaacgccgggtttcagctgcagggcatgttgcggaggcacacacctactcagaaacagtcgaagtctgggatgatcctgggtccatgagttcctggggacaacacgctttgcctcagtgacaggccaggaaaagccactttataaaattgtgtttacccgcctggcaaattcaactcaggtctctctctttggtcttttccagaccacccacgtgtgaacactttttagcttggggcggaagctcacatttcagaaacagccactggtttggccccagccccaaaaacccaggaccatctggaaacttggcccaattccacacttcaacattcctgttgctgtgactgacaccaacagtagcccttccctgcaggccccggcaggcagaaaacacacagcattgcaccctaaaatggaagaattttgctttgaatgatggctcttatctatggcggtttctgtgaagtttttggacggagaagcattggcagaacacagggtttttttcttgtctggacccatgcgtcatatgtgcacttgagcacacagttccctcactctcattgtttagtcttgtgaaatagggataatggggctattcccttcttcttaatgaaactaatgagccaaatatttgcaagatatatcaagaagtttgctagaagttttaaaacaaattcttccaaaaccattttctcaaaaacctgatttatttaattccttagttctttttggaaataaatgcaactctaaagtggcatttaaaaagagcaagatgacaattccataatctgctagaaacattgtcataaacattggaagtaaccttgactagctgagctcatggaaattatgtcttcatctgcctgtgtctttccatttctctaacttcacattaccagaaatgcacagttcatgtgggatgacatttattcaaggtaatgataacaatctagctgtatctccggtgatgcatgtgttccggcccttcccggcccaaggtccacttgcttgcttttctctccgagctcattccttctcattcattttgcccagaaagtt

SEQ ID NO: 13751 - DNA, 2167 bp, Homo sapiens
aggagatacaaaacctcggaagcatgccaatgtataaaacgcaaagtcaaaagtcaaacagggcacctggatctctcaagttgcctgcttgcccctcttcctttggttcctgctctaaaactttctaataaactctcactcctgctcaaaaacttgcctcagtctctcactctgccttatgcctcttggatgaattctttcctttgaagaggcaagaatcaagttattgtagatccgtatggattcaccactgctaacattatgctgaatggtatgtgagagtagaaaaaaaaacactgttttttccctgtctctaataatgagcttaacatcagaatagaaataatagaagaaaaaaatcaaagaactggaagccagaatttactcaacctgaacaaaagaaagaaactagaatgggaaaaaaaagaaaaaaaagaacagagcctcagggacctgtgaaactatcataaaagatctaacatgggggctaaaaatttactccaagaaataatagctgaaaagttctcaaatttgtcaagagacataactatagaattcagcaatacagaaaaagaaatatacaacaggaccaagcaaggtttattccagggaggcaaggctggttcaatattagaagatcagtgtaatctatcttattaacaggctaaagaagaaaaacaccacatgcttatagtaactgatgcagaaaaaacacttgccaaaattcaacacctattcatgataaaaacactcagaaaaaaatagaaatagaggagaatttcctcaacttgataaagggcatctacacaaaacctactactaatattgtacctaaccatgaaagactgaatgttttccctctaagatcaaaagcaaggcaaggatgtctgctctcatcactcttattcaacgtagagctagacactctagcctgcgcaataaggcaagaaaaggaaataaaacgcatatagatctgaaagaaagaagtaagatctgtttacttatttacaggtaatgtgattacacagaaaatcccaaggaatcaacaacaaaagactcctagaactcaaaagtgaccaacaaattcctctttaagtaaagttgggtctctcacatgtaattgaaagagtcctttatttattcacatatccatcaactatttattgaatgcctaaaatttgccagtagctattccaggcaatagatacaccatcaaacaaaaagagttcttaccctcaagggtgatagtaagagatgtaaaaagttaaaaaatggtaaaagagaaaaaatgaagagtgctactttagaaaatgaggtaagggaagagttatttaataagacacctcagaaaatgaggaatttggccagggggatatctgaggaaagagttccagtcagtggaaactgtgaattcagaaagcctgaggctgaaacaggcaagtgtgtttgagaaaaagcaaggaggccggtggctgtgcagagtgaggcagaggaaggagaatgggctgtggatcagaggaccctgtgccagatcatacaactccttgcagttcatgtaaggactcggattttacctggagtggaaaaagaagcactgaaagatttgagcaggggagtaacctgatagcgtttatgtttagtcctgccacttcgacagataaacgcaccaatgggcttgatgagatttaggccaacccataaccgcccctcaacttctttcctttcaatttcaaaactcctctatggcttcctccatctgttcttccttctgagaagtgctctctctgcccctttacagaactaaccacttcggcaactccttggacactttccttcttgttaataatttgctttctccgcccctcaaaagcttgctgtttctgtaaatcattacctgtaagaggaaccgctgggagtcctgtaaactttagcccagagcttggctcctcctccagaatgtctccaccaatcaaggaaagtgttttgggccagtcttgctcctccggattgtcagactgctcctccctcttctttagactgccacgaggaaaaagcagatgtgagaactcaaggttcagggctgctcttctaagaaacaagtctgccataatctccatctgtgttggaatctgttaactagtgagtacctcatctcccctcctgtgta

SEQ ID NO: 13752 - DNA, 2154 bp, Homo sapiens
agagtgaggtccggctacttctttgtccggtgcccaccctgtaaggttgcccctggcagcttctgtttctcaaccaaattctctaaaccaatgtgcctcaatggagggtgactttgcccccagaggacattgggcaatgcttggagacattttagcttgtcacactgtgggtgtgttctggcatctggtgggtggagcccaggggtgtcctgggattgtcctcctacgatgcagaggtcagccccacacagccaagacatagtcagccaaagtgtcaacagtggtgaggctgagaaagcctgcactagcccagggctcctcaagctattcattgtgaaggagcagcttcgattttccccactctgttgcaggccagtgtttttgtaagactagaactaagttaccagaaataatcatcatgcacttcaatgtgacaaccaatgccaaattgctataaagccttaattcctactcttgacttctgtagtgtctgatcatggaacaggaacaaacagtccatgggccggcatccatctgtgagccacactacaagcagcactggcctacatgcttctctctcctggggatgaggcagacgtaacacctcggctcttggctgctattagctctgggttcttgcacattcccttgtgataccctcttgcctctttacaactagccccttgataaataagatctttaattatccttctaggaagtgccatctgcccattcagggcccggctgattctgcagtgttttcctacctgggcaagtttttgagaatgtgggcagcgtcagaggctgtgtgggtagaaggacaacaatgtgacagcagcctggtttgggagcccagctaaggagtttgcactgtctcttgtagaccatagttagtacttgaagcatctcagtgggcaggcgacacagccagagttgtgttttaggtggagcactagagatggtgtggtgctgagaatgcactttcagggagcaaaatttgtggcagagagcctgactggaggctgctgagtccatcctgaccagaaatggagaggcctaagctaacactgtatgtggagttggaaggcagagggtgttcagaaggtagaatctaccagccagagtgatgggttgtgagcaggagtgaagggggaaatccaggctccccagctatagcttggaggatcagtggatggttttgtagggttggatgatgaggtggacagggggacacaggtcagagatgaattctatatctttcactagagtgcccatttcacgtggctttctcatgcaatttgtctgttggttgcctggaggcagaagtgtcttgcttttaagaagtgtgggctgtgggatgcaatggacctgttctggtctcagccccatcattcccccaagggaaagttcaaactgttcagcttcctccttctctaaaccggaataacttcctcagagggttgtaggagattaaatgagataatgcgtgtaaacttgccaggacaagtaagtgctaggcaaatactggttattattgttattagaaaaggcaaacttgaccttgccagccagggctgttttgagttagctggctctggctctccttaagtcaccccaactcctcctaccgccaacacacacacacagacgtacacacgcacacatacacacacacacacacacacacacacacacacacacacacacacagagcagaggaatcaggagccgccttccgcctttctgctcttcatcctagcaggcttttcctgctggccttgtttctgatgggccaattacagtgcaaaactgttccagacctgacctttcatcccggttccagtggcccgccaagaatcagccttgccttgttacacctccatcagcagcacagcccaaccgcagcttcatcacattaggatgtggcttcatcacattatgattttctctgagttggggagcaaaggtgagttggggagaccaggcagggttcctcacaaagttgcccaggaagggcaggaagacggggcagtgtccgagaggcagcatgacccaggggtcaggtgcggaggccctggagccaaactgcctgatttaaatcccagctctgccaacttactagctgggcctccttgggcaggtagcttaaccttt

SEQ ID NO: 13753 - DNA, 2146 bp, Homo sapiens
gataagtggggagactggtgttgatggaaacctcagtgagaaaagtgtagatgggattacagttgacaactggttgccttgatttaggataattggggaaagggaggctggggcacattgaaacacccaggttgtcgctgcctaccccagctgctaacatgaccagctgtaaacttgctctgttcttagaaacctcccttccaaaacatggattctcccgccagtgctcaagatgggacacattaccactaagtaagcacttttcttaggagcatttcttaggctgttaaaatgccaagactcctaaccatccttggtagctttgaacctatgtaaagaggtcagttagctgccctagtttattcctcagaatgatgagatttggcactgaaaatattgttcatactgagcctcccatcaaatgcaataagtagataaccacaaatacccacccttttatgctcataactcagcatgttggaaactattttcccttgacctattgccagcccatcacgccccacacccaggagaactcaagccccaaaccggccgctgaatagtcacgcttttctgcaggacatacctactattagggccaaaactttgtccacccttcaaaggaagtcgatgtttccatataaaggtcccctcaaatgcaacagcaagcccgtgggagaggggttagcagaggctacggccagcccacgggctttcttcgaccttgattatgaccaggagtgtagctgttaattgcgaggcttgcctcaaggtggaaaacagtatcggtttccactgccaccccagagaaggcaagttccgcggctggcggtgctggggacacggtccctcccaggcccatctcttgccacccagagagctgctcggaggccgcctacaggtgcaatcccggcactgcggccggggcgtcgggccggggagggcgtccaagcccaccagcatctccgccggcccttcccaaagcctgaacagggccccggcgtgcccgccgccttctacccccggtttccccgcgcctctgccccggcgcggtttggataggaagctgggagccctcccaggctccgcagactcggatttgggagggggtgggacgcggccgaggcttcccctcgaatctgcggcaagcctggctccaggaaagtttttcaaagttcccagcagcgtctgcccaggtcgcctccgcggggcgagcagacggcggcaagcgcgccagcctcgccgccgcctctgccgccagcagagcgctctgggcggctcgctcgcgggaagcgggccgaactcccggcgggcaggcaggccctcctcccggggcgaaagccgcagctgacgcaggcggttcggaaggcggaagctgccccgctccgaccgctcagtcagcgccgcggcgcctacacctggggccccgacgcgcgggcaaaggcgcacggcccggggcgcccgagggggcggtccccgctgggggcctccaggcgtccctgagcaacgatcccttccaagtacctccccgcactctcccttccctcctggcccgaagctcccgagggcgggggttggtgtggggccctggttcttctacgccgccctgagcatcccgctgcccccaaccccttccaagttcctcctcgcactaccccctccccagcaacgtgaaggggaggggcgtgcccagggtgagcacgccctctcatgaatattaataagcgcgcatgcgccctgcccggcgtgctgggtagaggtggccagccccggccgctgctgccagacgggctctccgggtccttctccgagagccgggcgggcacgcgtcattgtgttacctgcggccggcccgcgagctaggctggtttttttttttctcccctccctcccccctttttccatgcagctgatctaaaagggaataaaaggctgcgcataatcataataataaaagaaggggagcgcgagagaaggaaagaaagccgggaggtggaagaggagggggagcgtctcaaagaagcgatcagaataataaaaggaggccgggctctttgccttctggaacgggccgctcttgaaagggcttttgaaaagtggtgttgttttccagtcgtgcatgctccaatcggcggagtatattaga

SEQ ID NO: 13754 - DNA, 2143 bp, Homo sapiens
taaattccacctgcctagggattcaaactacatggaacaagtgcaattcctcagagtggcaactggcagagctcccaggaacaaggtagaactacacaatgtcccaggcatcagaggcatagattgcctgagtcagggagagtggtctctgtgacctgacaccccacccacagtgggaaggaaagctgtgggtgtgttatcaaggaggcctccacaaggggctggaaattcctggttttgtcttcctcttggaatgagacatttactctaagagaatcatggaaaagtacaaaccacagaatcataaaccacagagggagaagctacctcgtaggtcattcttatgctgggcccagataccccgataagcagatgttctcttctcaccacccctcctcgcctttgcttgcccacagccattgccaggactcttcctcaggcccagaaaggcagctgattcctggtaggagggcgctaagagtagaaagtaactaccattgtcaggtccagatctgttcccaatcccttctcactcctcctgcactctaaaaccacaccacagttccaactctttctgagtctggaatctttgagagtgccgtcatgtccttcttcctgtagccttcttgtccaccccagatggactgaccctcccacctacatccatgaggccagaaggcaacaaagacaagcgtggactctggctcccgccgaggtactctgtaccccgtggctctcggattttgcatctaccacatgccacaggcttgcgtccatccgacctccctagtttctcatccccacttgaacctgatgactgattcgccctcctggctacgctgagtaagccacccacttgccaaacctcagacctggtgttgacgcagtaagaaggcatgaggcccatgttgccagaacattcctaattgtttcattgtttccttgtaggatgtggtttcaagtcccatctttgtctcttttctcctggccaggttgcccttggtcaatattccttcattcactccagccactcagcaccgtgattaagaaaacaggatgtgagattagatgatccaggctctgccatgaactaactagctgtgaggctttagagaagtgtcttaacctctctgagcatccatttctttctctatagcattaggaatattaatagtacctacctcacagcttttttgttgtgataataccaataaatgaaataatcttcataaagcacagaggcttgaatgttcactctaagtatttaatatgtgtcctctactattttattttacaattatcattccttaattcatcatataattaccaagcctcatgccaggcactgagatataaatatcccctttaaagagtggtcatgtcttaaatccaggaagagctagttcatgttggcacccagggtagggagcgaagcccagggccacagcacagaggcagaggagaatagacactgaccaccaggagctgcccggggatggtgacaaaagtgccttccacctttccgcatctctttcaataccactgcaactccttgagtaaggtgggcaccacacagaagaagggggatggcagaggggcagtgagaggtccccagggaaacaccctcttcttcttccctgcttctctgacagagcacggccatgcctctgccatgcaggagggtgatgtcctttggggaggccttgttgaatctgtctggggctgttccggaagtaggaagggcggctgggggtggggagacggcaggaatgttctcctggcctgctggtctgtgccggcgagtgtgctgagaggagggcctctggacatcaaaggttccttttgtccccttccgagtggcagggcagcccggcccgggctgctggcgatgactcaggcctggccctgacgtcacccacgcccggccactggcctccctctgaagccaggaaactagttggggagtggcactcgcagctgcagcaaatctcaaaataaagaggcaacggcctttctcttcctctccatctccctatagcacaccttttatttcttttcttcttttttttaagcctcacgaaagattttacttgtagatcaactttcaaaatgtaggaagtcagaatgggtgacatcatcagaa

SEQ ID NO: 13755 - DNA, 2139 bp, Homo sapiens
tcagagaacagatctggagaggggcccgcagaggccctaaggggagagcagcaggccaggacagtgagacctgggctgacatcctggggttgggagtgggagccccaggtggccaaaaacagtgccaagtccggctggggcctatccccgcctccagggagtagcccgaggaggaaggatctccaattccttttccccccacccccctaaagtgaggttctggtgtgggggggtccctgagctgtctctgaggaagtcctagcatacagggccacaaacaggtccagctggtgccgccacctgctcactgggtggcacccaacccgctgggccaccaggctgagctaaggcaccggtgggagccgaaggcaattaggaaggccgggtgggccatggagcccggagggagccagccggcaggccgtggggggcgcccctggggcccaggctgcaggctcatggctcatccccaggctcagggaagctggcccctgggagccaggtatctaggggctgcccagccagcaaggggcgggagcctctcctgtgtcccggaacggggaggggcccggcggtccactcagggaggctgggctccttggacctcaccgcaagcaccaccagtgccaaaacaagaagcgggggcgggttccagtgctccggggtgatatgccgggggcggtcaatcctccctttccggccaggagctctgcaaggtcccgtgccccctcccctagtcctcaaggctgtccctcccggcccacgtagaggagccaggagcgtctggagttgggtgatgggctccagtggctgcgcagccctggggcggccgggaggctcctggcggcagtctccgcccgctcccgccccagatctttggaaacattcggggaggcctgcgggggatgggaggagaagctcagctctctggggaccaacccaccggcagccccagcccctctcctgcgcctccccgtgcgcccctcttgctctctcccaccctctcccgccccggcccccgcagggcgccttccgccgcgcgtggctgagccggggccgcgtgcaccgcagccgaggccgccgggtctgagcgcgtgcgcgcaggtggcgggggcgtcccggccgggggcccgcggactcaccgccgggcggacgcaggtaccagcagcctggccgagctccccgaacctcgcgcgctctggaccgcggctggcccggagcctcccaggcagccgcgcggccccggggcgggggcaggggcgggacgcgggaggggcctccggcgggcggagtcggcgagcccgcggtgggggtccccgcgccgcccaggcctaccccggctccttgggatagatggggaagctgaggcccagaagggggctgagaccacctcccagtttccccagtgaggtggcgcctgagccacggccaggcccggcctccttccacccggccctgctgtgcgcgcggcgggtgctgacctggcgaggccggacaggggaccaggtcggggtgaccgtcactgacacctggacagtcctcgttgtgttcggggtgggaagcccacgggtgagcagacgtgtttgggtgtgagcacggaggaggggtgcctcggagagtgtcggggagcagtgttgggggtctcgcctgcggagtggagctcgggaggggaggacgcaggcacccccgcagcctgggattcctgaggtcatcttgtccctgcttcccgctccaggctgggctgttccttggccatccctcaggcgggggtggggagaccggcaagggttgggaggtgggaggttgtgggtgctggcttctgcgagggcactgaggctctgccatcggtgggtgcctctcctcccgccaggccctctccgaggggctgtgggcgctggggctctgccaccggcctgttctccagttgacagtgcgtttcctttctgggtgacagggcgagcaccagggaggggtcttctgaaccccacacgggagtagggggagggtgtgcggaaatgtgagggtgggcaggtggccatgtggtcaggagggggctggggctgacagacacctgtaacacccctgtctcaaatctaggggtgcagtcaatgtggctgtgtgtgtgttttgcatgagtga

SEQ ID NO: 13756 - DNA, 2130 bp, Homo sapiens
cggagctttgtaaatacgaggtgactgtctgcctacaaactttgtaaacatcacttgaaatggccgcagggtattgtgacatggccataccactatttgtttgctattgaatttgtacttccctgccttacttttgctattgcaaaccatgctgtcactaaggtcttcatgcacacagttgtgtcttggtcagatgatatgtttctaccaattttaattgtgtttctttccacctggacacacagctctctggcccagggctgggtcatcagcacaccctgctgctgctgttcagatctgcatcctggtcccgcttggtcccacagtgagaacgctttgctatcacatgggcaggctctgagagccctgccggcctggccttctcaaagaagacctgagagcttgggacccaagcagagaggaagaacagggctcagggtgcttgctccatgctcgctccacacctggggctcaaccctggctttccccggctccctgtgtgacttcagggcaggtcccttgggccctctgggccttatcatcttcatctgtaacagggcgatgcctctgccgtgtctggtggtgttgaggagttcctgtttgtgtaagcagctagttcagtgccagcacgagatgggaggcccatgaagttagcagtgcacaaaaaatagagcaaagactggatgcatttcctgagaacaaccatcactgtaaagcactttacaaatccaaagacaacccccggcaaaaactcaaaatgaaactccctctcgcagagcacaattccaattcgctctaaaaacattacaagttagttcatgtcatgccagatagctgaaggcagctcacaagttcttaaggccaggaatgccatgtgtctgctatgcacagctggccctggccctgacagcaaaggtgacgcagatgtgggtgccctgctcctgcccagcagcagtgcttggtggaggctgaggccctgcacaggcaccctcactgctgaccttgagcctctctctcctctagagtggaaaagacaaggatgccgtggataaattgctcaaggacctggatgccaatggagatgcccaggtggacttcagtgagttcatagtgttcgtggctgcaatcacgtctgcctgtcacaagtactttgagaaggcaggactcaaatgatgccctggagatgtcacagattcctggcagagccatggtcccaggcttcccaaaagtgtttgttggcaattattcccctaggctgagcctgctcatgtacctctgattaataaatgcttatgaaatgatcctggtctcagagaaactggttatttccttaaaacctcagtgtcctctccccacaaaacagaattcactaattaaacttgtcatttcattactcattgcctgcctgcagtggtgagacagatgaagaagacaaggcagtcgataaaaatccatttgttggccatcttctgagtgcccactgagacacagtcccacctttggccgtgtgaatgccaccatgtcctggacccaagggaggctcgggtacacacatccatgtatttattcatctacttcgtaattcatttagtcggtcacgtagccactcattgaacctgggcccctccatctctccaaacagcatgttttcttcaagtaacatacttctaatatttatttatttttgagacggagtctcgctcttgtcacccaggctggaatgcaatggcgccatctcagctcactgcaacctccgcctcttgggttcaagtgattctcctgcctcagcctcccgagtacctgggactgcaggcacccgcaaaaccacacctggctactttttgtatttttagtagagacggggtgtcaccatgttggccaggctggtctcgaactcctgatttcaggtgatctgcccacctcaacctcccaaagtgctgggattacaggtgtgagccactgcgcctcgcaaagtaacatatctttttttctttttttttttttttgagacggagtctcactgtgttgcccaggctggagtgcaatggtgcgatcttggctcactgccagctccgcctcccaggttcacgccattctcctgcctcaacctcctgagtagctgggactaca

SEQ ID NO: 13757 - DNA, 2119 bp, Homo sapiens
gcagatgaggaaagaaaaatggagtcaaatgagcacaccgaggccaaccagatctgagctttctaatcttaaattgcctgggggtgtggatgttatgtgtctactgacatggacagattgtgtatggttgcctttataaaatgaagcccatagaaatgtttcagtaaatacagtcctccaagtgaactaaatgtcaaaggaaaatcttttccttgccatcctccttttctcttttaaacggaaagatcctaaagaagctgtattagtgccctcaagagaaacagaagcaataggatatatagatctatatattggatcctatatctaggaataggatatatagatgtatatatcctatatatagatctgtcctattgatctatagatctatatagatatatatcttatatcaatatataggatatatagagaggtacacacataggcctgatgtatatacataggtctgatgtctgaggccagaagatagatgccccagctcaagaagggagcacattcacccttactctgccttttgacgctacttgggttctccatggattagatggtgctcacccacattggtgagggcaggtgttctttatgcagctaccctcatgacacacccagaaataatgttttaccagctgtctgggcaagcccttggcccagtcaaattgacacataaaggtagccatcatagaaactcatttcaatgttgttttgttttattacaggaagactgaagaaacctaatcctaggtgctgccactgggacaaacaagaagcaccagacacagtgctgttttagggtggggcagaattatgctgagggaaaagttattatcactctttaaggccaaggaaaccacaatttttaaagaagcttctagaaattctacccagtagaaaataaagataaacttctgtaaggaatttcattcttttcagaattcgcaatctgaaatgtagaagcccattccttcatggttctcatagatatttagtgtgactgaggggtcagtggactcatagcactcaggccaggcttctcctgagtccctttctttggcacagagggagtgattcacagatcctctacccccaaaggcattgtttcctcatctcaacaagaatccagcacccgtcattttatcagcacacgtcactagcttctcaagtgagactactctgaagtgatctgtgtttgaagaatgcctttccctttcccttacgtaactaagaggatgaaaaaggacactcactccctatatgaaagctgtgtattgtaagcagtcatcttgcctggctgagaactctaggatctttttctctgctctcctttaggctgacactcatagccagaccttctgtttattagccccctgaatctatttgaaaatatttttgctttcattataatataagtcacattcttcttgcatctgccgctgcattttccaaaagggttatgtcaagggaaattcaacactcacttttctcattatttgcttaccagcttgctcactcatcaaaataccagagttatttgatacttcagaagattatttccccctttagatgatgtgtcaagggaaggggagctggccccagtatcaggtgacagaattttcttcgcatttctactgttgactcaataaatgcccttgggcaagtcatggagcctcttcatactttggtctctagggataaaatctgccaaccgcagcatgtgtatttgaacctcagtgtcctctggaataaaaataggaggggaccaggtgtccatgtgaccccaagctgatgggaagaggatgaccataggacttcaaaatgtccttgagctgtaaattctgtaatagggtcaggcccaccagtggccttcaggcatttgtccagtggtgtatggataagttctagcacttgagttttttcagcacaaaggaggcactatgtcaacctcccacccatgggtattctgtttgctctgtgtccccgcttctctgcatttccctgccatattactcaccactggtcgtaattacttgcttgatcacttgtctcctggtctgtaagctgtttgagggaggggagcacatctgccctatgcaacactgta

SEQ ID NO: 13758 - DNA, 2110 bp, Homo sapiens
ccgagctttaggtcaaactctcagcaccgcgactagttaccctgaaatcactggggcccggtattacaaaacagaacacactttcctctttcttcccctttatttaaaagagatgataggctttacgagttatttttaatagaaattttttacaatgaaaagaattcgggcgtactgtttgcaaactgcagcagacaggtctgagcgccccagaaggcggccggccccagcctgggagcctgcggggaccactccctgctgccctggcgcatgtcctccagggacacgggccaccgttgcccctggaaaccctgggggacaggctccctcctgggcgacctttccacgtttctttcgccccccccggagcggcacctccatacctcccgggccgctagtcccccgaagcaggccccagccccggcgcaagctgcctcctccgcagtccccgcccgccgccagcccggccaccgccggacggcgcccttcccagccccgcgccccgctccccagccctcctcgcgcgtccgagcccacgtcgcttgccccggctgccaagtcttccagacggccgggccctcccggcacagcgcgggaaccccggcccccggccccacgggacgagggctacagggcccggccggcgagccagggcaccccggggtctccaggcggcccaccgccctcaccccccaccggcgtccccaagcccccagaccgtccccgccgcgccctcagcgccgccgcccccgggccggccgaggctccgcggcgagtcccgcccagcgccccggaggcgccagccccacggcccgagcgtgcgcagcgccccccgcggccgcgccaagcgcaggcgacggcacaggaaaggaggccgcggcgcgcccggcccggccccctccccagcccgcccccggggccgctggcggtgtccgcgcctccgcgcccgcccctgatttcctccgggcggcggcggcggcggcggcgcctcgtgcgcgcggttatttatttccgggccccagagcgcttataatggagccgctgtcagcagaaccttctgccgccgccgccgccgccgccgtccctcctcttttttttcccggcagatctttgttgtgtgggagggcagcagggatggacttgagcttgcggatcccctgctagagcagccgcgctcggagaaggcgccgcagccgcgaggaggagccgccgccgccgcgcccgaggccccgccgcccgcggcctctgtcggcccgcgccccgctcgccccgtcgccccgtcgcccctcgcctccccgcagagtcccctcgcggcagcagatgtgtgtggggtcagcccacggcggggactatggtgaaattcccggcgctcacgcactactggcccctgatccggttcttggtgcccctgggcatcaccaacatagccatcgacttcggggagcaggtaagccccggccccgcgccccacgcccgctcgccctgccttggccttacacgcccggacacgggggcggaggggagtcacctgctccgagtccctctttatcctgaaacatttggtcgggtgtgcagcttgtcaagggtgacttttccagcaccccattccctccctccctcccctcaattattcagcagacttttccagccctctctggaaaatgttaaaaagactggatggtgtgaagcttcacctatggaagggtttttagtgcacggcagtattatgtaatttgcgattatgtaaacctcagctctaattaaaatgtagtttctagtagcttaagtgctgggtttttatttacccatggctggtggtaatggtgacggtggggagattctgttttataatgcgtccaagttgatttcccaggtacttccatttttaaacatttgtttcgtagtccaggtaaggattaggggtatcccgaatgtgtcctgataagccggtcttgaccatttatttctagtttgggatttcttttttttccttttccttttctttttttttctttctttctttctttcttttttttttttcatggaccactaaagaaggggagcacatttttgtttggggtcgccttctcgtccttgtttcttttcacgt

SEQ ID NO: 13759 - DNA, 2064 bp, Homo sapiens
ccgaggacttgtttttcagattgtgtgaccttcagatgtgttcagtaagaccttattagtcgaggtatgtacaagacttgtactttgaaaaaactataaaacattaccaagagaaattaaagaagtcctggaaaaagggagagataggtcatactcatgaactggaagactcaatattgttaaaaatgttagttttccacagattgatctatagattcaacatgattccagtcaaaatctcaacagacttttttaggtagaaattgttaaggtggttttaaactttatatgaaaatgcaaaggatctaaaatagccaaaatgattttggaaaaaaactcaagttggaagactcactgtattaggccattcttgcacagctataaagaaataccagagactgggtcatttataaagaaaaggggtttaattggctcacagttctgtaagctaactgtacaggaagcatctgcttggcttctggggagcctcaggaagcttcccatcatggtggaaggcgaagggggagcaggcgtgtcacacgacaagagcataagtaagggtgcggggggggggtgccacatacttttaaatgaccaggtcttgtgagaactcgctattgcagagatagcaccaggccatgagatatccacccccatgatccaaacacctcccaccacgcccacctccaacatcggggattgcattttaatgtgagatttgggcagggacaaatatctaaactctatcactcatattacctgatttcaaggctatgtaaaactacagtaatcaagacagtgagttatcagataaagacagctcactgaaacagaaaagagtccagaaattgacccagccatatctaaccagttgcttttcagaagtgttatgctaaacgagagaagccagacacaaaggattacctgtactatgataccatttatataaaatcctggaaaaggtaaaacaatagtaacagaaagcagatcagtcgttaacagggacctgagatggtacttggctgtagagatacacatgggaactttttggggtgatggaaaggctgtatattgtgattgcggtggtggttataggatgtatatatttgtcaaaactcatcgaattgtacaattaaaatggatatttttggttatatgcaaactataactcaataaaagatctggatatatattagggcattgtcagtataatttcagctttctttgagaccctactaaattaaggggttatccatttgaacatcagggattggttcccacctccaggtggtagagcacagtgcataggaacttgggccagaaagtcaggctgtctgggttccagtatcagctcctccactgcagcaagcacacagcttcacctgtctgtgtctcggtttcctcatctgtgtaactaacctgacattagtggttacctcctagggttgtgagggtcaaatgcgttaatatattcaaagcatttagaacatttccttgtgcatagtaagctatatataagcattcagtatgatcagtaagttctcaaatcagtttgtgttgtgattttacctctttctcctaaaatgtgttttttcccctttcctttaccctctctttaaaccacgtgcactcgtgtagcttgaggtttttaatagaatgtttgaaagggatgtcggataacatcagcaccaaatatgggcaacaaaactgaaaccagtgaggttgagtgatgtgcccaaggtcacaataatatgtgggtgaccacaaaccagaagcctggccaggtgactcctggttcagctctgttttatcaagggttacagtgtttgcatttttaatactaaccattgggatttatcgcgaacctgccattcatcaattgcattgtgtggtgtttgtttttctacagagcagttcagagccccagttgcagacgacttgtcctgccaccaccatgagttctggtaagtcattttaaactcatctttctcttatctaccaaactgggcagtttacccagatttcccacgcaccctgaaggccccactctggcattttattttt

SEQ ID NO: 13760 - DNA, 2032 bp, Homo sapiens
gcagggttaatcctcatctccttcccctgctctgtggtcctggctcttcccgcctctgtgcccagccagcagcactgaccagcagcctctgcatctgccctgttgggattgatcgccctgacctggctgtgggcctctaagcacattccaaaggcctaggccgttccttcctcctcctcctgcagagctgccaagcaagcctcacagcaaacccctgtccacttcctaaacacgcatttgtaacaacagacactcttgggtcccacctctctttgatgtgaccttttacatccctgcggccaccttgtgatttctcctgtgtcttgactgagctgatgcccgtctttcacagcctgtgtgcaattctatctcctaaatacgtaaccccttctctgcctcttccacacagtgccctccacacccagaatgccctcctacgcctcccctgcatttcagccaacgctcctctcctcaaggaagcttttcctaaccaccaactgtgaacattccagtcatctgggctcggcagaggtctgcttatgcatccctttcctgatttgcctctcgctgcggtcaaactgacaacctccactcatcttttgctctttttgtgggactaggttattagaccttcatgtgggacctgggccaggagtgctgagtgttcagggagaaagctttccagccacagaagtccgtcttgttgggcagatatgggaaaagttaaataccaagtcaagaaataagcagtatttttgtcatctttgctgacacacagattgtcttattcatttaatattttttattcctgtgcattaggcacagtcctgggtgtgggagaaacaacaggaacccaaccagacaacggtcccactctctgtagtgggtggtaagagacataattgagtgtgagacacggtcacgcgccaaggaaaacaagaggacccagggaagagacgtgggtgttgggggcgcaactacaggcatggcgtcagggctgggggttgggggccagtggagggggaaggggccaaaagcgtggcaggcgggtgcaggcatctagggccacagcctccactccccactgtgcggtgcagggcaggggtgtgaagtgacctggctcgtggcactcatcatcccagtgctgtcctgaggacggggaagagctgaagcaggcagtcgggtgcaaccccaataatccagtgagaaactgtggcattggtagtgggcgcagcgagatttgatcagagtttggatgtaaaagtgacctaagactttgttaattaaagttttcatgtagagtacagataacacagttgtaaatttggaggacaggaatcactgagctggtggataagacagcctcatggtaagaagcaaaggagaagtcagtctccgagaaggcgtaagtgcagtcaggcgagggaagcaggaggcctcccgggaacctggctggctcactgtcccaaacatgttagcttcgtgctgtgaggacgcttgcaacaaccacatcagcgggcatccacaatggtgtgggataggaaccccactctcgcaaatggggggcatccgcaacagtgtgggataggaaccccgctcccgcaaagcgggggcatccgccatggtgtgggataggaaccccgctcccgcaaaggataattcacggaactggggaagtttcgacaggaaagaaaagatcttcctgtgttttcaggagagagaatgagaagcagcccatattaactattcaagtatgttgaaaagttgttactaggaaaagattattattgtccttgtcctgtaaccagaggaagaattaggacctgtggatacaaaccgcagggagagaggtttcagtgtggaaaatagaagctgtttcttgcaattagagctgaacaaaaataaatgggctgctcaagaagaagtgagctctccatcattggaggtgccaaaactaggtggcagaggcaggtgcaatgctgcattagcccagaaggccaagcatccacgtatcacacggaagacccagatc

SEQ ID NO: 13761 - DNA, 1986 bp, Homo sapiens
gtggtatttcttctgtcccatgctttgcatgactgccatggtacagccttgtttcaaactgttcactgtgatctgtgggtctttgagtttcagtgagtttgctgaaatgtcgaagaagtagttccaaacttcaatgttcaatgaaatttttgttcaagtttgaaatggagagagcagctttaaaaggtactaagccttttacaaattggtgagtactggcacatgagatctagagcaggagcaacttctcacacatagtaagtgggaaaagaaagtgctttgaaagttcctccctcacctacacagtagtcgtcatgtcgagacctgccagagagagacacattctcaagtgaatcctggcttcttggaagcgcttgcctagacgagacacagtgcataaaaacaacttttgggggacaggtatgttttcttgcagctgcggttgtaaggtcttggcaagacaagcagtgtggccagaattttgaacttctgatgaatgtgtaatgcaaaggaccttgtacatttttttgtttcaaggtcctcaaaatgagcacatgaagaggttgctgtgaaactttaagtggccctactgcgcagaagcattcagatgtcacttgatgatctgtaagggaacttgctgatttgggaatgtgcttagggaacacacattccttttgacagggtctgtcactgggtgggtgatgaattatacagatgacatgtgcttttttttcttttttcaacctcaatggtattcctacaggaaatggataaccattttaactgtattttttgcagcccgtaccttcttgggaatacaattgtctaactttttatttttggtctggctgttgtggtgtgcaaaactccgtacattgctattttgccacactgcaacaccttacagatgtggaagatgtgaaatttgtcatcaattatgactaccctaactcctcagaggattatattcatcgaattggaagaactgctcgcagtaccaaaacaggcacagcatacactttctttacacctaataacataaagcaagtgagcgaccttatctctgtgcttcgtgaagctaatcaagcaattaatcccaagttgcttcagttggtcgaagacagaggttcaggtaaggatgactgataggaaatgttggtagttacgagtcacatcgttgtctacaaatccatttaaatggtattggagggtgagtaaaaccttgaatgtgaaaacttaagctgaaaaattgtaaaaacatttcacgcctaccatgaatagatctgtttctttctgtccacaatgatttgtgtcatagacataattgatcaatttgcaattgttttcttgacaggtcgttccaggggtagaggaggcatgaaggatgaccgtcgggacagatactctgcgggcaaaaggggtggatttaatacctttagagacagggaaaattatgacagaggttactctagcctgcttaaaagagattttggggcaaaaactcagaatggtgtttacagtgctgcaaattacaccaatgggagctttggaagtaattttgtgtctgctggtatacagaccagttttaggactggtaatccaacagggacttaccagaatggttatgatagcactcagcaatacggaagtaatgttccaaatatgcacaatggtatgaaccaacaggcatatgcatatcctgctactgcagctgcacctatgattggttatccaatgccaacaggatattcccaataagactttagaagtatatgtaaatgtctgtttttcataattgctctttatattgtgtgttatctgacaagatagttatttaagaaacatgggaattgcagaaatgactgcagtgcagcagtaattatggtgcactttttcgctatttaagttggatatttctctacattcctgaaacaatttttaggttttttttgtactagaaaatgcaggcagtgttttcacaaaagt

SEQ ID NO: 13762 - DNA, 1943 bp, Homo sapiens
tatccctgggcactgattctttagaagagaaggtgggggaggaagcagccttaggggggcagtagggccggccctgagtgatctagagcctggctgggggagggcgtgtttctggccagagtgactaaggctcctcctgcaccaccctctcaaccagggcccccaaaagaagcatctggagaaggaaacgccggagacctcgggagacttgtaggctgtgtggggtggatgaaccctgaagcgcaccgcactgtctgccccaatgtctaacaaaggccggaggcgactcttcctgcgaggtctcagagcgctgtgtaaccgcccaaggggttcaccttgcctgctgcctagacaaagccgattcattaagacaggggaattgcaatagagaaagagtaattcacacagagctggctgtgcgggagaccggagttttatgttttattattactcaaatcgatctctttgagcatttgcggagcagaggttttttttttttttttttttgagagagtcttgatcttgtcgcccaggctgctggagtgccggggagcagagtttttaaggataacttggcgggtggggagagccagtgagccaggagagccgattggtcagggaggaaatcacagggagtcagctgtcttcttgcgctgagtcagctcctgggtggtggccacaagatcagatgagccagtttatcaatctggttggtgccagcagatccatcaagttgcagggtcggcaaaatatctcaagcactgatcttaggggcagcttagggagggtcagaatcttgtagcctccagatgcacgactcctaaaccataattcccaatattgtggctaatgttagtcctaaaaatgcaatctagtccccaggcaaggaggtggtctgctttgggaaagggctgttactgtctttgttttaaactataaactggctgggcgcggtggctcacgcctgtaatcccagcactttgggaggccaagatgggcggatcacctgaggtcgggagttcaagaccagcctggccaacatcgagaaacctcgtctctattaaaaatacaaaattagctgggcgtggtggcgcatgattgtaatcccatctactcgggaggctgaggcaggagaattgcttgaaccagcgagttggaggttgcagtgagctgagatcgcgctactgcactccagcctggaaacagagtaagactccgtctcaaaagaaagaaagaaagaaagaaaaaaacaaaaaactataaactgagtttctcccaaagttatttcaacctaccagcagggatgaataaggacagcttggaggttagaagcaagatagagtcggctgagttagatctctttcactgtttcagtcatcattttgcaaaggcggtttcacctgggcgcggaaaggctgcatgacctccggcagctccgggcttagtaccagggactggactggggggacacgaccctacggattcgcgccgtcgcccacctggccaggccccatgtgcgcccctagccaccagggcgcgaggggcggcaggggcggggccttggggaagcggcctaggggtggtccctgggagtttccatgggcggggcctgctggggagatgcgattggactggcaccggggggcggggccttggggaagtggcccaggagtggtcccaaggagtcaacgtgggcggggccagctgggaagatcgtattggaccagccctgaggaggggcggggcctcccggaggcggaagccgggattcgccctccggggagcgattggtcctcgggaggggcggggaggtggacgcgggtaccggcggtcgtcgggtcggcagcctttggtcagttggcagcggcaagcgcgctgcggttccggtggcgccatgtcgttctgcagcttcttcgggggcgaggttttccagaatcactttg

SEQ ID NO: 13763 - DNA, 1941 bp, Homo sapiens
gcctcctgagtagctgggattataggcatgtaccacaacacccagctaatttttgtatttttagtacagatggggtttcaccatgttggccaggctggtctcgatctcctgacctcgtgatcaacctgcttcagcctcccaaagtgctgggattacaggtgtgagccaccacggcaggccatgaactttttttttctgattttcccttgatttcctgtgaattggctggcaagttggggatgtctatgtgtcagggggatcgacagacaggaggaagagcacccatggtctcaggagaggtcgccctagtacacagagctcagtagtagaggcagacttgggctgctgtgagccaggctctgcctccttctggccagtcctgctgggctgtggctccgtaagcagcagctccctccacactgtgaccacccactgggatcggggacacagcacaaagtggtatggacatgtgggcttcttcaggcagggtggcagcctccagagctgattctgaacctgcaaacctgggactcttccctggcatgattgtgtgctaacatcacatgacagtttcaaggtgttgtaatgcccttgtgtacactgaataatgcctaggggttcctggtaaagactgggctccaaaactcatagaaagtgggctgtgattgctgacaaatgctgatttgagcttcttctctgcacagctccttaaatgcccctcaacataaaacagacatgaaagagggtgaagccgctgcggccctcctgggacccacgtgggaggatgaagacagtaaacaggcactagactccgccagaagcagacgcaccacgttggttgattttatcctgcagaaaaacatctcaaacagcctgtcaatctctggacatgtttctaactcagtcaagtaccaggtttcacttataaaaatgaagactcttcaagaggtaaaaagacaccaaatacattcaaagtatagattttcaatttctcaagtcacattttctgaacgtgttaagggaatcctacaaacagggcagcacatggcagaggctggctcggcttcacacgtgttcatggtgcaactgctgcagtggggagcagccccgcaggaggagtgggaaccgaggaggatgcaggtcctgcccttgggagcttccagaccaacagcagagagaacctgaagtaacacaactcctctgagaggccctgagggctctgcagatttgttcaaaggagtgagaaatcaccatggtcctgagagggggaaggcttcctggaggaggtggcatttgagacaggactggagagaagcaggagggttttcagctgtgaggagagataatatatgcagaggcccaagctgaacctagggaaagatctaggagggtaattccggctgaaaagcaggagagaaggcaagtaggagggaggttccgggctccgggttaaggaaggttatgtgggcttgaaggtccagtgaggagtcgctgtgtcacggaagggctgaggagagaagtgactccaacagaacagagctttaggaatccaggatgtcggctctctgccagaaatcttcggacgccacagccagcctgacctttacagtctatgaagcctgagggctttactttgcaggagtagatgagagattagagaggatgcctgacctgagatcacacaccaaacagccctggccagtcctgaatgcagagcccctgcctgcgagcccaaggtgcctgcaaacgggctcagtttggtgacaaggctgcagggagggttgagaatggcatggatgcagtaggctgtgtgcagtagccctgcaagttccagagctgactactggaaataagaccgggccatctcggcaccaagggccaggacctggcttctgggtcagcatggcagggactggacaaatccacaatcttccaagcaaa

SEQ ID NO: 13764 - DNA, 1940 bp, Homo sapiens
gatgacaaatgtggttctcctcctccatctacaggcatgtcccggttcacggcggctgtgtccccgcggcctcagacccagggtccagcccatgctctggcccctccggcggccaggatcagcatcgctgccccggggcccgcgccgagccggctgctcctccgtgctctgcgctcctgggcccgcaccagccccctcccctggagcccccttcgtccctgcgagggttccctgcacgccccgcgctgagacccagcctggcccgggccggagccctccgcgacgtcaggatgcgcctggcctcacgccgcctcccctccgtcttctctgggccgcagccgctcctcgtgagtgaggtcgcggccagggagccgggtggacgcgccgggaagctgcacggtccacgctccgtctgcgcggagagccgggcgcgcgtggcccggcccctgcaggcgcgactgccgccgccccggtgggctcccctcccccgcacgcccggcacgcggctggacgactgcggccgcgcgggggctggaacatcccctcagagccgcaagagagcgcacccgccgccggcgcccggaacccagggcccctttaagaggcgccgccggagcagggccgtgacgtcatagaagtgcgaagggcggagtctgtgcgcagccgcggcgcggggggcggggcgggggcgcggcgttcttgcgggcctgactgacaggagcgccctccgggagcgaccagtactaggccgccggtcgcaagagcgccccgcgtaggccccgccccgaaaggaggccccgccccggggcaggccccgcctccacaaggacaccaagtcccgcacaagccacgccccccgcaggccccgccccactctgttcagatctaggcccaactcaggctccgcacctcaaggctccgcccccagcaaggctccgccccaggcccggctccaccccgcacaggccccaccccgagtcaggctccgccccgcccaggccccgccccgggctcggctccgcggggcgggacttgccctcagcctgagtcggcggcggctgcgggaactttcccagcggatctaatggctgcgcgcgggccgctgtgaggcgcggcggcgagcgacgggcgcggggccgcggagcagcgagcgagcgagcgagcgcgaggccggagccccggccaggcccggccgacccgccgagcccgcgatgcgccccggggccgccccccggcgcagctgacgccccgcggccccgcgaagaccccggccggccggtcccggaggaagcggccgccgccgccgccgcccagcccagcgcccgcgccgcccgggcaccatggcggggaaggcggccgccccgggcaccgcggtgctgctggtcacggccaacgtgggctcgctcttcgacgacgtaagtcccccgtgccggcggcaggccccaagcccggaacccccgaccctgaccccggggtcccgaactgcaagccttggaccctggaccgtgaacctccagacccagaggccccagactctgatccctgtacccgggaccccagactcctgtcctgattcccaagtctgggagcccagacccctgtcttgatccccaagcccgagacctgaagacctgggccctgaatccccgaaccccatcctccagactccagcagctgaccgttgaccctgggaccctgcctctgaactcctgtctgcaaatcctgacctcgaaactccaatattaaaaccctgtcagaacccctgttaacagttcctggaacccaaaccccagaaaccgggtctgtgcgcaccaaacccagccccagccctgatttccgaatcctcagaaccctggccctggaatgcccatccccaaccctggccctgaaccccaggtccatggtcactggaaccacaaatcctgactgcagaactctgg

SEQ ID NO: 13765 - DNA, 1938 bp, Homo sapiens
gtggttcagaagggatgtgtaggacaattgaagtataataacatcaagttgtttgaattaaggacagaacatactgggtagatacctgctcttacacaaggaacaatagataaagtagaaatcttagaggccttcccagaactggggtcaatcagaagtcaacacggaggattagcttccaagatggagctgctttcgcctccacatccagcaattccactcttagattccaattccactcaacagaaatggaaacataggtccataaaaaaactgtacatgactgtgtacagcagccttattcacaatagccaaaatgtggaaacaactgaaatgtccatcaactgatgaatggataaacaaaatgcaacagaatatgctccagcaatctaaaggaacgaagtactgtacagatacatgctacaacatagatgaaccttgaaagcattacgctaaatgaaagaagccagacacaaaaggccacatattgtatggctccatttatatgaaatatccagaataggcaaacccatagagacaggaaattgattattgtttgctagggctggggtttggagggtagagttaggaagagtgacagctagagggtatgggtttcttttacatgtgatgaaaatgttctcaaattgtggtgattgttgaacatatctggaaatatactaaaaatcgctgaatggtatactttaaatggttgacttgtttggtatgtgagttatatcccaataaagctgttatataaaaaaaaatcatgcgagcaattatctcaacaatcaagagactgtgttaaagattctttgcttggccaaacttcagttaggcttctgaatcttctcccaggtccttgtgtgcacttccttgtaaatgcagtgttaggaagtaacactgccacggcagtttagcaagaatcccccaccctccatatgtgatcaaaattctttactcctacccttagtatctgaccccctggcctgccttcactgggactcctgttaggttggttcagccagaatttcccccagaattgatgtttcctcttagcagttttccgaacacctgctccttgctccttggctataaatctccacttattcctggtgtatttggaatagttacgactgagttgccttcacccctttaacttccgtctttttttttttttcacaatggaggacacaaaacgttgttatttcaagtctttgtggccaacagattggtggtttatgggccagcatccctttttatgcgtaaaatatttaaaacgcagcctgcaatggttggtaaagtggtgaaacgtttagtgtgtgaggtcggatcctggtctggccgctggccctggcgatcctctgaggcggcctgagtttggggcgcctcgtgtcaccgcgcgcccctcctccgggcctgagtcacggtgccgccggagtccccacgcgaggatgctgcggtgagcgcggccgggacgccgcgtcgggctctcggccgcccagcggcgccgcaggggaagccaggccggcagccgcgcgctccccagccggccaccaatcccgccctccccggctcctccggacctcctcggcaggcggcggcggggcctgcctgtgcgctctgcgcccgcccgcgcctaccctccatggcgtttatccggaagaagcagcaggagcagcagctgcagctctactccaaggagaggtgcgcgcccagctgaagaagggcccagccgggggcctagtcggggccggtcgtggggacgccggccggagatctgagggacgggaggcggcgtgggggccgggcacggaggcaggggccggacgcgtgtccagggcctgggctgggggctgtggcggaaacctgaggtcggggtgagaggccgggggcctggtctgggccggagcctgccggggacaggaactggatgac

SEQ ID NO: 13766 - DNA, 1907 bp, Homo sapiens
ctctacacgaactgccttggactctgggacactgggatgctagtttctccattcttcgggagcgccctttggcagcccctttcatagtcagctcatatcctgccacttcttggagctgctgcacgtaaggtgggtcccggagatccctgcccgcggggcggggctggagtgtctgcctaggaggcacatgctctcccgcagccagggaatctcagtctgcggccactgggcagaacggcaagggagagggggaagggcggagggacgcagcctgggggcgatttgccgggcggagacgctctttttcagacaccctcctcaggtgggcagatctcaggttagattcgaagactgtaaaatgcccacaggtcgggaagtggtcaaggtttacagaggagaaggttagaggaatggagactcaggaggtaaaggggagatgtcccaaggggagctttgagaaccttggattccctctccttaaggccgcacacgccctgggggaaagaaagcaagttggtgggaggcgggaggtgctaagcaggagcatctgtctctggcacttggtgggaagttcacactgccatctttgcgcgccaggaaggaggccagggctggggaagggtccagtcggctaggaaaattaaggaatgggaaggggctgtggagggtggaacggcatcgctggagcctgggcctgcgccctctggggtgtgggggtggaggtgggggaggactggaggaacaaaacaaaacagccaccacaccaaaacacctaggccacggatttttcgccttaaggtcaagtgcatgccaatggacggagaaaattgaatagtgtgtgtgtgtgtgtgtgtgtgtgtgtgtgcgcgcgtgtgtgtgtcttcacctttgacagctggagaatgcagacggcggaaaataactattacgctccagtgtgaggcactgtttgtggggtggggccctcggcgtgctggaggtagcggacacaaatccaccaaccctgcccctccggagtccccaaaaccacgggcatctggaagcgtctagaaattccggtgcccggaacccggttttgccaaacttcgcaatctcctcacctgagggcacccgccaagatctccgtggcaggaccacgcatcgcgcctcatgctctgggccggagccagatgagcaatcatgcatcccactacccaagtccctactactctggggactttgcaggaggtgagcgcctaaccctatccatcagccccagtgcttaagtatcctcccccagaggtaagaatgaggaggtcccccatgaggttccatgtcaaggcagcagtctccgtggagccccagtgggagcggtctgggatacgcgggcgagccaaggggtccaggcggggaagttggggttcagcctcccgccggtcggtggctctggaaggagcgcagacaaccaggcggcaggcaggcagcggctgcggagtggacctctctctttcagcagatgccgcgggggatggggaacttagagaaggggagacaaggagagtgtaccccgcctcccggcaccccagcccgtagtacggctttaaaatcctgcagagtttgtcataggccggcctcaccacgcatgcgcatagcaaagttgagttttttctttcttccccccccttccctctctctttccagccgcccctagttctgaaactttaaagaacttttttctttctttctttctttctttttttttttttcttccttctgagaacaccaggggaaagaggagtctggagagagggagggagagagtaaggcagttggccagaagggctggggggtgggagggggggacgcgtccccgcggtcggtcagtctgtttgcggggcacaggatcgcgtggaaatctgctgcgagct

SEQ ID NO: 13767 - DNA, 1878 bp, Homo sapiens
ccacagtgctgtctccactaggtagggagtccactgtcctgaggcactggctagggaggggcacacggactcaggcccaggggcacgggccaccccaacctgcccacacacagttcattccccttggctcagagctgtggcccgctcttgaacctggcccaggtacagcaggtagtacctgagggtgtactgtggggccggccagccgggcactgtggccaccgcctcatctgacatgaaggcctccatctctggagctccagctgccaggactgctgtgaacagcgaggagaagcagccagacacaccccatcaggacaagctctgggagaccctgctcccagcagcccagggccctatggttcctgctcctagcgacacgcaagggcccagactgcccgcttcacagacaagaacgcctatgtacccaagtcgtgcccacccaactcacccgaggctgtggtgggcccacaccgcagagggcacacagctcggtgactgcagcccccacatctggcaggaggcagaaggtggcggtcgaacagtgcacaaccagctcagggggattggtggccaccagctgctgcagacgtggccggaagcgcccctctgtgggaggccaggtcagggtgcctggggtgctggacccaccagggaggccccgcccccactggagacacccgccccgccgatgccacgccccaatgaagacccgcgctacggaggccctgccctcggggcgggccgcccttcacagtcaagctgccaggccagcagccgctccagctccctgtcacatgcttctctgctctgcccctgatggccgctggcaactcttcccgatacctgaggaagggcggtgaggggaggactggccacggaggacgctcgccccaccgatctctatccccttccactctaccaacagtccggggcttccagccgccctcgggggctcgcgctcgcccgtagcacctctcgtggcgctccagaatggcagcccagcgactggggtcctcacaccccacagcgcgtgggaagccgctacgttcacgcgcaggggcgggaggcggcggctgggggcggggcctctgctgatggggccgggtgctgggggcggggcctctggattgggcggttgctgggggcggggcctctgcggatggggctgggggcggggcctctgctgatggggccggcggctgggggcggggcctctggattgggcggctgctgggggcggggcctctgcggatggggccggctgctgggggcggggcctctggatggggccggctgccgggggaggggtctctgcgcgttgggacaggggcggaaccccaggtggtcgggacaggctgttgcgggagcgcgccctcagcgaagcaagtgaggcatctcactgggaaagtcgaatgtgtgtggcggccgccgccgaggcgggttccgaagagacctcagcagggcaggccagggcctacgcgaacgcccacccttaagagcgcggggacagggaactggagcgttcctcccagcccccgacgtcgcgggcccagtgtccccgtccaggctggttgggcgcacgcgcggccccactcgcccccacgcgtgcgtccccgctggtcccgcccccggccggaagttccggcggcggagctgggccgggcccgagcggatcgcgggctcgggctgcggggctccggctgcgggcgctgggccgcgaggcgcggagcttgggagcggagcccaggccgtgccgcgcggcgccatgaagggcaaggaggagaaggagggcggcgcacggctgggcgctggcggcggaagccccgagaagagcccgagcgcgcaggagctcaaggagcagggcaatcgtctgtt

SEQ ID NO: 13768 - DNA, 1846 bp, Homo sapiens
gagatcctcctcctccgattttagactcctcctccgaccttagacctctttttcgacttcagactctgtcttcacccccaaacccttttgaaaaccccagcccatgcttcatctccaggcctctttgactgcagacgcctctttggacaacagatccctcctctgacctcagatcccttcccgcaccccgacacttctgactcctctttcaaccgcattctcaaactttagtgtgtgttaggatctttgaaagcggatccccagattccactccagagatcatgattcagtaggctgggatgaggtccttggaacctgaatatttaccatcattttaagagtttttgatgtggttctggaaaggacactttgagaaagaaggagtggtggtagtgatggtagggcaggagtggggcaaggtggggaataggtctccatattctggatgtctgggttctattctgccaccgctcaaacactgtgtaatcttgggcaagacaattagtctctctatcagtttccccatctgtgaaatggaaagaataatagtacccattttagagggttgtcatgaggattaagtaacagaatggaaagcgattagtatagggcttggcacctactcaataaatggcatcatcatcatcatcatcattgccttaatctggtagattcattccctccaaactcatccatcctctctccactccaaaattccaaccacactacagcttgtactacttctccatatccaaggatgagggaggttccttcttttacgaggtctctgttccaaactttcattgtgaagtccacaggaagagaggggggctggtgaagcctctatacacacatcctttctcttcccaaccccagaccagtctcagggatggcctgaagtgcttgaaaaatctactatatacacagcagctgcagtagcaactatagacaggagggggaagcagtgtgtcgggaacagctctggggtttgggtgtaggacttgggagagaggataggaaggagagggctactcagagctgtgtggtaagagtgcccagggagggtaacagtctatcaccaaaaagtgtacccattgtctgtgcctttccccaccccagagagttcttatctcctcagtgatgtttgtagggtctattacactaccctgaggtctaatccctctggtgggacccttccccacttgatgaggtctgcaccttctcagtgatgtccactcccacagtgtagttggcagctcctcactggagtttgagtcctctggtagggtccacgtctccttagtaaagtctatatcctctgtatctcttaggggaaatccatgtctcctcactagggtaagtgcccttcaaagccattcatgtcctattagcagggcccagggcccttcagtcagatctgagaacccccagcaacatctgtgctcccttagtggagtccatgtactgtcagtgaagtgtgtgtcccttcggtgcagtgaatatctcctttatgaaagtatctgaccccttggtggggtctatgtccaccccaagaggtctgtactccttcagtgggccctcagattcccgccctccttgggattgggcagactctcggtctcccatagagagattttttttcagcttagggtgtgcaaggtttacagtcagctgggcaaagtgcagggaagtagctgggaagggaggctgggctagatggggtcacaaggcctgtgtaggcttcaggaggtgggagctgcccgcttcaggcctcagaatcactcttggagttagatatttaagaatccttcctgccttgacagccagtctgtgaaatgatggtgag

SEQ ID NO: 13769 - DNA, 1800 bp, Homo sapiens
ccagggtgagaagatgggctacaggggcagtctgatccgggggtgcccccaacactgaagccgtcttccctgacttgtcaccacagagactcatgaaattttggagttatcagacaccctctggatcctctagtgtggtttatagatgggctgtggcagcatcacctgggaaatcaatagaaatgttcattcttgggtccccagaccctctgaatgagattccctgatgggggtgcccagtgccatccaggtgcatcttatggatgctgacagttgagaagcattgctgtggacactgctctagagttgttctcgtaagagactgatggaggggaactttggtctagaaatccggagtccattcctgatgcagctgctgacttctggtttccttatttggccctgtctttcaatgatgataatcctacaccttttttaatgggagtgatctgagtggttaagctaatgggtgtgtagttaagagctggtcacctggagtcctatagactcagggtcaaatccaagctcagtgacacttgggcaggctacttaatgttctctagatctgtttctttatctgtaagatggggtcagtaataatcaacacccatggggtggctgccaaaatccagcgagtttacaccgcaggtgcttagaccattgcctcatacatgaaaagagcccccaacttgttatgactcttattattagtgtcatcatcacccatgacctgtctttggggcctggcctcagaggtgctcaccgttggtggtgttcagttttcatggctctccacatctcctgctctgttcccatggtggttgctctgtgtcattctgtgacgttttgggaggagggtctcccccgcttgcccctgcccccggtgacattgattggtcttcctggggaatcaggcctgttacatcgtctgcttatctccatgcctctttctatagacatattgctcctgagccatgttgagcatctcactgggaagaagattggtggttttacaccaccagctgctgtcattcactaagtccctactttgtgccaacattttacattagcactaagctacaccgtagcctcagaatgtaaggactaggatacacattctacagatgtgtaaactgaggctcagaaatttactaactgggtgggactatatgaacctgccatttttgtaggtgaaaattgcagcatattggcaatttcattcggtatttttttcatacaacataattgtttttccacaaaatttagaaaaaaatggcctcaaggaagttttcttatttcttctaaccaaactgttacctaaaaggatgcattaaaaaaaaataagttggggtcatgcactgttccaagcacttcacgtgtaactcactcaatcctcatgacaaccttacgaggtagatgggatttttattatcctcgttttgcagagtgggaaactgaggcacacagatgttaagtagcttgtctgagtccacacacctgggagatggctgagacaagagtttggacacacacagtttgggcccgggtccgagcgcctagcctccgcctatactagtccgttgaatcttggttaggataagtccccccgtttttttttttttttttgagtgaacgggattttcggtgttgcagaactcgatgagtgggggaaggaagggcccagcgtcactgagctcctctgtgagtctgtgcgtggcgctcctcttctgtctttgcagcagccttgggacggacgtaacggcaaccccgttttccaggtgaggataaccagactgggag

SEQ ID NO: 13770 - DNA, 1799 bp, Homo sapiens
actgaggtttcctctccctcatccctcatcacgcctggcccgcaccgtggttggtaaagaaggatcaagaacacctttaatccgacgcgaaggctttgagggatacatagaaagggagccacgtcgttgagctgctctggattgaagaggaggacgcgggaacgccctcctccacctcactcctctggtgcgctgagcccctcaaacgcccccagtcctcctccccgtggcacgcgaggaagattctcagtgtccttacagagtcatcttccctgagccccgaaagtgttggaaaacatttagccccttctttgggaaactcagtttctgatcagaatttttgttttacccctggggttgacagtctccccagaggtctcatttcatactgtcttttcggatctgatctcttggtaaacaggcggggatgttttaccctacagagccgatgtatgtgtgagttcgctgtgagttctttgagtgtctcaaacttgtggggccttttctcggttgcactgggattgaagagggaagagggccaaggtgtttccgggcaagcggcggggttaagtggagatgcgactcgtgaggctctcctttccgatccccctttgggacaccctctgcctacctctaccctggagccagggagacccaagtcttggtgaccggatgggcccgctctcagttggcctgggctctgggaactggtggactctccctgggggcttcgggctgggagtgggttcggtttgtgtggcttcggctctaacaaagagatccgctgtaatccgccgaatctgttatcaatttctctgctgcttgagccccgccccacgcgccccgctcgccgcgaagcttggaaagtgcacgcggccagcaccaatctgggccgctgactcggaaacatgtcgcagcgtgtgtgtctatgcacgcgtgtgagtgtgtaaatgtgcacgagtgtgaatgtgtatgatgtgtgtgcacgcggcatcggctgcccttggggagagttgactttgcagcctgggctgcgcgagaagcagactttgcagcccactccctcccctggaggaaatttgacacttagggcgggggtggggagatagccggagccttctctctcctagctggggaaaccccagatttccattctccaggatgcgccccccagctttgcagcgttttggggacaactgggccttgggtgtggagccctgcttagcaggcgctggggaccacataagcatttcctctttgagaagccccgaagcgtccaggccaaaggggcggctcacggagaaaaaccttggcacgcccctgagccccatagctttaccagggctgcctaggtcccctctgccccttttacggcacaggttccaagccaggctcttccaccgccttaaagaggctcacctttcttttcttttctgtggaaggggctccttcaggggctatgggcgatgcagtgcggcagggttagacttacgtgtaaggggatttttaaaacccgctcctcccacccgcacccgccacctactcgctccgccgccgcctacaggtggagaagtcaccagtggggaggaacggcagcggaagcttccaaggccaactcctacccctgaaattcttcaggaagggaaccttcgccgctgggggcctctttgccctggaatcgatgcgcccagctgcggctcggaagccagcgcctctggccccgtctggactcatctgcaagggctctggcctcgccccgcacccccacctttcggcactgaccgaaccaagtctgagtt

SEQ ID NO: 13771 - DNA, 1799 bp, Homo sapiens
gggtgtgcaaggtttacagtcagctgggcaaagtgcagggaagtagctgggaagggaggctgggctagatggggtcacaaggcctgtgtaggcttcaggaggtgggagctgcccgcttcaggcctcagaatcactcttggagttagatatttaagaatccttcctgccttgacagccagtctgtgaaatgatggtgaggtgggcacttctttgtggtgagtgcaggtgagagatggaggagggtcctgcctgacttctttctggggtggaggggctagagagaagctagaggtaattaagcccaggttgtggtggtggtggtgggggtttcccttggtggagtaaagagattgtgaaggaaagaagagaatgtgggccaggtgtggtggctcacgcctgtaatcctagcactttgggagcccaaggcgggcagatcacctgaggtcaggagttcaagaccagcctggacaacatggtgaaatcccatctctactaaaaatacaaaaattagctgggtgtggtggtgtgcacctgtaattccagctactcgggaggctgaggcaggagaattgcttgaatccaggaggcagaggttgcagtcagccgagattgtgccattgcactccagcctgggcgacagagcgagagactccatctcaaaacaaaaacaacaacaaaaaaagagaatgtgaatgatttttcctatttgcacagactttgatattttacaagccttagcttcaagcctgacgaggaagtaaaaccaaatctggagtcaaagaacctagctttggccctaacttggtcgttatttgctctctgactgtgcaccagttccttccctttcctgggtttgccatttgtgcaattaggaggtgggcttattacaaaaaacctgaaggtgtctcctagtcttcacttattgagtcttgtactttagatctggatggagatttgtgaaggcaaggagattgaagacatgtcctcataagagggagaaaatctgagctggttccagggtgagcagagaggaggtgctgtcgccagagcatgccctcaaggtcatgggagaagtttttccggaggacgagaatgtgggtgtggctcagagaggggggacctggagggaagggtgtcacctggaaggaactggtgatagtcaggactgtgcaatcagatcacggggcggctccgcgatggaccttactcaactcctctccttagtccatccctttccctttcgatccttgccttaacccaaccccttatctgtcactccaagaccccaccccactctggtcactccatggctctgcctcctctcctgtcacaaccagccgggttactccccatcactccatgggcccacctcctctcctgtcccgcctggccccgcccctcccttggcactccacggttccaccctctcccttgtcacacccggccccgccccttctgctttcactcgacggcgtcactccttccggcaagtcagctccacccctatccctcgacttttccttatagtatttctgtccttgccaacctcgatccctccccaaccagacacggccccgccccctctggcaccgcccacccgccagactaagccactcccccactcaccaggccccgcccctctacggaggccccgcctctagttcggcctgttttctcagtcccggcacccgccgcgaccgcaaaggcggccgcggttctaggaacttgacgtgatggggcttcctgaggagcgggtccggagcggcagcgggagccggggccaggaggaagctggagcc

SEQ ID NO: 13772 - DNA, 1797 bp, Homo sapiens
aagagggtgctctggtcttctctcccgggctctctcaccatctcgcccaggccctcagtttctacctgcacagcttgccagacctcccacgtgaacttcccacctgtgccccaaatccagcgccttccttctgtgtctacctggtcaccccaacccctccctctctcgaacctctatagccacgcccagggcccaagaggcgtggtcacttcttgacagcgctgttctcaccatagctcagcacctgtcccaatacccccaagtcctcatgacctctcgcatggacttatggtggcagtaataatagtagtagtaattttgaaaaatagcaactaaggctgggtgcagtggctcacgcctgtaatcccaacactctgggagactgaggcaggaggattgcttgagcccaagagtttgagaccagccagagtaacatagcgagatcctatctctaccaaaaaaaaaaaaatagccagacatggtggcagctacctggaaggattgcttgagcccgggaggttgaggccacagtgagctatgaccccaccactgcactccagcctgggccatagagcaagaccccgtcttagaaaaaagcaacagacacgtatagataatacttactacattccaaactgttctaggcactttgcttgcattggcccatttaatcctcatacctttccgggaggcaggtacttcttattcccattttagagatgaggagactgaggcacattgaggttaagtaacctgcctaaggtcacacagctattattaggtggcagaactaggcaaatatttcctggatgagcctcctcctcccctcacactcacctccaccaggccccagtgtcctagagcctgctctgattttgtctcctaccagcttgggggtcatcagagttccctgcaggccgctgggtgacattcagacatttttcactgggcattctaggctctcctccaaccagcccagcttactcttccaccctgtggttctgccatcaaactgggcctgggttctattcatttctcccacagaacctcctctgacatccatctctccgtgcccagagccttcctgtgcctctaagtctgccttcaagacttcctgctccagagaggctttgctgacactctcacctagagtggtctttccttcctctaactcccctgacacttctgtgatcccccttgttccatggcccttgtcactttttgccctgaggacatatcttctctctccaacataggtgatagatgattccaggggagaagcaatatatgtctccacccaccccataaatgtatgtcaaagagatctgtttgtatctgttatcaaggtggcaccaatgtatgcaccactggcccgggggcaggaaacctggtttctaatcctgtcactacccagatggctgtgtgactttaggcaaatcacctggtgtcgctgtgctttagtttccttcttgctggaagtagatagcaatactcacccagacagaagagaccacggtaaagatcagctgacggcctctgtgggaacaaagacagggaaaggggaaatgagttcaccagaaaccaacaggcagcacaggaggtatgaaaattgcctggctttgtttgatgggacattagggaaaagttgtgcctagacttcccttattaaaaacaaaacaaagaaaaactggcgagggtcaaatgagaatacaaatacagtaagtgcggaagtctcgtggggggcctcagggctgggtggctctcgtcactttgcccagtcttggccttggcactact

SEQ ID NO: 13773 - DNA, 1796 bp, Homo sapiens
gcagaagagaagagaacaccgtctatgctgagctcactgtgtaccagatcctccaccagcagctgagagtgtctccctcagtcctcacaacagcccgatgggtgccattcacagatggggaaactaaggcaagatgagcctatgagcaagatggttcccggccccacagctgggaggcactggagctgggatttgaaccagggctgtgaccttcagactctcacgcccaaccatatctggcagttgtctctcatatctgtgtctctccctgtccctgacctttctatgtatctctgtctctgccctctgtatatcgctgctgggtctctcagggtctctgacccctgtgtgtctctgtctcctctgggtgtccgtgtgtctctgtctccgccctccgtgtatctctgttgcgtctctcaaggtctctggcccctgtgcatctcagtcccctcctggtctctgtctcccatgccctctgccctctccctttctccctggctcccgccctgtctgtgctgccgtggtcctggctgtgcctctgtccctgtgtctgtttccagggtgccccttacgcgtcagcccgtgagggcaagtttctgtctgccccttccccagcggtggcctagtgcttggaacagcgcctggcagacaggagatgctcagtaaatatttctcaaatgaataaaggaatgaatgagtgaatgaatgaatgaatgaatgaactcgctgagatgggcgagatcagcgccatttcccaaatgagcaacgtgggctccaggtgggtgcccacaggcccagaactgccagcccggaaggttctggcgtgggcttggcactgaccccctggactctgcccccagctgagcaccagacgccaggacgtgcccatcactgctcctccccgccctcagagcagggtggctccctctggcctctccccgctgttggaggcgtgggtagcagctgggagaaccggctgggtgctgcccctccccttgggccgggcacggagtaggcacctggcgggctccccaggtggcagacgctgtcgctgcgcacacctggcctctgtgccgcctgctccctgctcgtcctcccctccccaccctcacccacctgccatggacgggcccgccgagccccagatcccgggcttgtgggacacctatgaagatgacatctcggaaatcaggtgaggcccagacctgggcaggagccaggagatcccagggaggaggtggctgtttgggggagccggggactgtggcaagggtggcctccagccacccgcagccgcaggcctggcccagacttagctggaggggctgggctgggctggggcatccagtgtggtgtataggtccctcctgagaagggagtgaggacccgaccgtgttgagtcaccagtggggatgcctggggtgtccctgtcgctctccgggcctcagtttttctgtctgtcaaaggggcccacaagccctgtgtctccctgatagagcagtggaagagagcaggcagcttggtgcatagtagttgctcaggaaacacaacagcctgtagtacccaggacaccccatgcaagccctgaaataacgggggtgcttgggggtgaaatgggagagactgggatgctgctgagacccccagagggagaagctgtgttctagggcacttggggcggagagggcaggctctggactcttcaggtctcctaacagtggttagggcagagcactgcccacttccatgagctcagcgtgactccctcttcctggggatgagtcagacactttgac

SEQ ID NO: 13774 - DNA, 1779 bp, Homo sapiens
gcattcccattctaaacccagtcgcattgcaatccctgcaacaaaagggatccgagatttcctccactggtgactgtgacctggggactgggaagtactgtatacaggaagatcttgaagagctgtccccttgaatagtcagcaccagggttgcacggaaagtaatagctgaaatccaagttgggttttcctggcaacagccaatattagtcagaggtggcacttggaggattccccaggtctgctcattcctttaggatcattcattcctcccaaggcctcccttgggaacaaaggaaaaccccagagtttgggattgggctcttttccaccaacagctgctagtagtttgtatttaaccctgagtcacaattaaaataaaagagggcgggcgggggaggggcgaggagttggtaagcatcccctaggaaacacttaggttttctctaaatttattccagaaaattcttctaaaggacttttcaaggaccacagcatactgccttggaaacttagtttttaacctttttcttttctttttttcttttttcttttttttttttttttttgagacagagtctcactctgtcacccaggctggagtgcagtggtgcgatctcggctcactgcaacctctgtctcccaggttcaagcgattctcatgcctcagtctcctgggattacaggcgcgcatcaccactcccggctaatttttgtatcagtagagacaaggtttcaccatgttggctaagctggtgttgaactcctgacctgaggtgatccgcccgcctcggcctcccaaagtgttgggattacaggcgtgagccaccgcgcccggccagtttttaacactattagccacactgaaactgaactattgatcaagtgacgccacacaaaggggtaaatcccctgttcaacaaagggtttgtgacgcccctgggtgctgacaagccaaaccgcaccctccctgcggcacctcgcgggccggtggggcgggaagcccggcttctggggaggtgccgcccctccactggcgcaggccgccgagacccccagacggacctcctagggctaatctgatagtgcctctgaggtcgataggactccacgtgccactccctgcagggtcatccagcaagtaattcctagacccgtaggtggccgcagagccggttacctctggttctgcgccagcgtgccccacccgcaggacggccgggttctttgatttgtacactttctaaaaccaaacccgagaggaagggcaggctcagggtggggatgccctgaaatattcgagagcaggaccgtttctactgaagagaagtttacaagaacgctctgtctggggcgggcgaggcctctgcgaggcgggtccgggagcgagggcagggcgtgggccgcgcgcccggggtcgggggagtcgggggcaggaagagggggaggagacagggctgggggagcgccctgccgagcgcccgccaggctcctcccgctcccgcgccgcctccctctacccacccgccgcacgtactaaggaaggcgcacagcccgccgcgctcgcctctccgccccgcgtccagctcgcccagctcgcccagcgtccgccgcgcctcggccaaggtgagctccgcccggcccacgcgcccctcctgggtagtccccaggcccggacctgctgcccggggaaaaccctgcacccggcttcgcggggcgtccggagcaccgcggggctgggcggggagcggctggtggggaatccgctgctcagtgctc

SEQ ID NO: 13775 - DNA, 1773 bp, Homo sapiens
atggtgttcactttcggtagagcagtagaacttctctgtagaacttctcagttgtttttgacttggtcctttggggagtatttactaagcagacagtgtagtacatgctctagctgagggtcacgatgactcagaatccttgtcctccaggtgttgcaataatcggagcagccacttccctcagcctggccgcatccagataagcagagtgattacggaggtgccttaaggaagcagcgggttgagggtgctttggaggcatgaggaacaattggcccctattggaggaagcttctcttttggaaaagaagttgtttgagctatggcttaagagggtagggtaaacttaggtgcatagagggaggttatcccaggcatacaagacaacctgggcccaggcctctgaggaaggaaaaccagtcaggctggcagactggacctggtaggatgaaacgtgcctgttggcacagtgccctgcgggtactctgcagatgcagctgccagcgagagagggggcagggatgagaacaggctggcagagtagcgtccctggtgtctgtgctcaaagcagccatagcttgggcctgctctgggtgaaggagacggatttgcaggcagcttggaaaggtgcctctcataagtatccttcagatcatttatcagtaatgctgtgaggactctcccttcttttcgtttttgaatcacaaaactgccatagaaagtagttgaattaattaaagacatacctctaataaaaattaaagtcacaatgtctaatttttttttcaataaattaaggagcatgtgaggtttttttcctttttttttttttttaatgtagggagtagggggcagtattaaaaaaaaaattctactgattgaactttttctcccagccccagagggtccatggtcattatgatggccctaaagcctggctctgacccctgcttctgagccaggtcagagcaaggcctggggtggaggcttctggggaaattttgtgttgttgctttattaaaggatagttttgctgaaatcactctatcccttgggtcatatacactgcatcacactttttataggagaggggctatagaagcctcccctacccttggaggtgacgtagtattgtaagaaaatagtgggggcagagcttcgcctggccaaatatatatgtgttctaattgtgctttacacaaattaattatattgtttgaaggtatcaaagatgaatatttatgaaattatacattaatgaaacactttcaaatgcctttcccgtccccacactgaacacagatacactcactttccaagctaaagtactggaatcatggcaatttcttccaatcagtgccagctccataattgatgagttttcacttccgttatttcatttgagtgtagtgatgatgtggatgttgccctcttacaaaaaaaaaaaaaaaaatcaataaactgaggcccagagcaacatgccatggttaagaaccaaatcagtggtagagctgagtcagaactgataaactgtgatgactacgctcctgcttgtgaagatctctgccaatgcaagaaaataagggagaatccagtttaagtcaattggtatacaacatagttattaccaagactctggagtcaggcaggcctgagttcaaattctggctctgtcactggtcagcactacttcagggcaagtaatatagccctccaaaccttaatttatatgtttgtataatgggaatagtgatccctcactcatagggatgt

SEQ ID NO: 13776 - DNA, 1772 bp, Homo sapiens
gctgcaggatcataaaactgcttttccactttacaatcaatcaggttgggtcaggcaggatttcaaggcttctgtcctaggtagatgggctctgtaaagtcccgcttaaaaaaaaagtgaaggtaggttcaagatctgcacacaactggggatgaggggagtctgatgctctgctgtgtgatcatgcaaggaactgttcccagtgcaagttatgtcgctttcagggacactttcttcatccaaataagaatgtcaaccacactaaaactaatggatgtctctgagtggtgtgtgtgtgcgggtgcgcatgtgcaaatgtatcttaatatttaactgtcagacagccagaaataagctctcatcctgtatctcacgctagtggggaggtctagaaaaggcgggggggcttggactgccggatcccacccacgattaatgtgctgaagcccccttctgttatgatactaaagtaattcaaattgaagagaaaggaccgttgggtattattgtgtctcttggccctccaatgtgagcgatccccatgggaatggacgggatgtctctgaaaaggagtagtgattctcacactctgagaaagcagtctcttagggaagggatggtgtctttaggtttggatatcacgtgtaaaaactgggtgtggaaaagaagggagtgacacttcttaaaggtatgttttattttgtttgagatggagtctcgctctgccacccaggctggagtgcagtggcgcgatcttggctcactgcgcctcctgcgcctcctgggttcaagcgattctcctgcctcagcctcctgagtagctgggattagagacgtgcaccaccacgcccagctaatttttgtgtatttttagtagagacgggatttcaccatgttgcccaggctggtctcaaactcccgagctcaggtgatccacctgcctcggccttccaaagtgctgggattacaggcgtgagccaccacgcccagatagctcaaggttttttaaaaaacatctgaatctgcgtgcttgcgccgctccaggtctccatcactccatattctttcactccaaactcctttagacattcctgcctggcctccaaaagcgtttgggtttgcatctctggatttttttttcaacttcctcattttacagttgagaaaaacaggaggtaaagagaggaaggaatctgctttaggaagcagctctggaaagcagaacacagtttcctgctcccgctctctctccactactctccctttaaaaaatatactttcttctatggccaattaaacattcattaccaacctgcgattcccttaggactttaaaaggagggttgttcaggggtgacaacaatcttctgtctgttatacgtgtccatgtaggcaaaaactttcccaaattcaaccccagtctaggtcccaaaaactaactacagagtgcagggaaaccagacagctacagttcagcccaggaacctcctctcctagctcacgtttctacccgagcccgcggaggcacagaccggaagtggcgcgcagcctcccagcggagggaaccgcctatgcctccgtcgcgctggccggaagacgggggtgcaaccctttgaagtgtcccctcctacttcttgctgcctcacggttgctgttgcagacccaggagtctctgaaggcttccgcggctttggggccggttgtgagatgccaggcagaggccgctgcccggactgcggctccacggagctggtggaagactcgcactattc

SEQ ID NO: 13777 - DNA, 1757 bp, Homo sapiens
caagctttgtagctggtgttgtggactgggcctcctctctttgtcctttccccagctctaaataagaatcatcactgttatgcattactcagagtaatcacgaacatagcctgtagagtcagacagtcctatgtctgttatctggtagctatggggccttggccagattacattgcttaagcctcttccctgcactaataaaattagcatttttgagcatgctaaatgcactgaagtgtgaggcactttgctctgttttttaaatttaattcccagagcatctctgtgatgtaaacgtgattatctctgacttaaacatgaggacagtgaggcttagagaatttctgtgacttgtcttacacccaaagggaagaagtaggagggcatgaccccaaactctttccagccactattgccttgagtgtactacctatggagtacaacaccttccttgccggggattaaacattcattttggtgcccagcctacggcagcagctccacagctagtggcgattataattagcattctctcatttggggttagatttctttttttgtgccggtaatggcaacttgaaaagatactcaaagagattttaaaaatttagtctgttagtcaaacttactagacaatgtttaatggagattgcgcttattgtgattttgaaaattaaaacaacaacaacaacgaggctttctctggttccttttcattgtagagttatcctcccacatacaatgtgaaggacatgcttgtgccgactgcagtctggagcgggggtcacgactggcttgcagatgtctacgacgtcaatatcttactgactcagatcaccaacttggtgttccatgagagcattccggaatgggagcatcttgacttcatttggggcctggatgccccttggaggctttataataaaattattaatctaatgaggaaatatcagtgaaagctggacttgagctgtgtaccaccaagtcaatgattatgtcatgtgaaaatgtgtttgcttcatttctgtaaaacacttgtttttctttcccaggtcttttgtttttttatatccaagaaaatgataactttgaagatgcccagttcactctagtttcaattagaaacatactagctattttttctttaattagggctggaataggaagccagtgtctcaaccatagtattgtctctttaagtcttttaaatatcactgatgtgtaaaaaggtcattatatccattctgtttttaaaatttaaaatatattgactttttgcccttcataggacaaagtaatatatgtgttggaattttaaaattgtgttgtcattggtaaatctgtcactgacttaagcgaggtataaaagtacgcagttttcatgtccttgccttaaagagctctctagtctaacggtcttgtagttagagatctaaatgacattttatcatgttttcctgcagcaggtgcatagtcaaatccagaaatatcacagctgtgccagtaataaggatgctaacaattaattttatcaaacctaactgtgacagctgtgatttgacacgttttaattgctcaggttaaatgaaatagttttccggcgtcttcaaaaacaaattgcactgataaaacaaaaacaaaagtatgttttaaatgctttgaagactgatacactcaaccatctatattcatgagctctcaatttcatggcaggccatagttctacttatctgagaagcaaatccctgtggagacta

SEQ ID NO: 13778 - DNA, 1756 bp, Homo sapiens
tggggaatcttcctaaaaccctaaaagctagggcaggtctgcttgagcaggagcagcagggtctgggggacccctgagggcaggacagtcagggacccacagttgagctgggcccgctgagccctggatccttcttggtgtcttatcctggccagcaagcaagtgtgagctcctgtgggtctccagaggcccatgaggaccagtgggccagttgggaacaaggcttggcgtcctcttcaggggggaacaccagggcaggcctgaggaggcctgtgtccccagcctgtcattgctgtggctccgcttctcagggagcctaggaagaaggtgtggcaagagcccgaggcgctggctgcacctggcggggcctgtgggcgtcagtttagacccatccattctcactgcagcattccagggtttgcccttatgctcggctgtgtgagggtgaggatgatgctgtgggggcatgcatgctgggtgtgtttcagccttctcttccaccaggcatcctgacatcgaggcccaggagagaggagtccggtgtctacttgagaaacagctccccaatggcgactggccgcaggtatgccgccagggacctgagcgcacaaggcccagcactgacctccagcgtgcatggctgtttccacgtccccctgctctgtgtcctttttggggtactttggacacttgggaggcgtcacctctgccagtgaatgccacagttggtggcaggtctgtggcaggtggtcgggtcctaaagtccagatcttgctgttgtttcaagtgatgctctgggtgggggaggagctggatgggagaagccagtgggcgggaagcctttttgctgcaggacagaccctcccactccagatgacctagtggcccctcactgagccagaagtccctgtggtgtgggtgtcatgaggtcatgtgaggccaaccgccctcccctgggatgaggctgagttggtggaagctgatgtggttgtgaggggctggtgaccctggcttagggtttgctgcagggcggggagtctgagctgggctgatggtgccatgactgatgcgggatggactacttgctttcctatgctcttgcttaattagccctttccaggctgactcacccacaagccagccaagccaacagccagggctccagttcagggactagccctcagctgactggtgaagcctttgtgtttatttctctgtgttcttttaggaaaacattgctggggtcttcaacaagtcctgtgccatctcctacacgagctacaggaacatcttccccatctgggccctcggccgcttctcccagctgtaccctgagagagcccttgctggccacccctgagaacatgcctacctgctgggtgccgtctgtgcgttccagtgaggccaaggggtcctggccgggttggggagccctcccataaccctgtcttgggctccaacccctcaacctctatctcatagatgtgaatctgggggccaggctggaggcagggatggggacagggtgggtggcttagactcttgatttttactgtaggttcatttctgaaagtagcttgtcgggcttgggtgaggaagggggcacaggagccgtgacccctgaggaggcacagcgccttctgccacctctgggcacggcctcaaggtagtgaggctaggaggttttttctgaccaatagctgagttcttgggagaggagcagctgtgcctgtgtgattccttagtgtcgagtggg

SEQ ID NO: 13779 - DNA, 1753 bp, Homo sapiens
cttccactactctctgggggatttgggtaagtcaccctggccttggtttcttcatctataacatgatgtcatttgtagaagtttgtagccgatcaccacggaggctgtcccagccctaacatcctaggattcaacaccacttactctatcatcccttcgactgagcactacctcctccctacactccctgccttcaaagtcaacaccttccttcttcagcaaaccccaccttgaatatttagggtcagcttggatttgtccctcttgttcatgccacagccccaattctggaagcttctctccaagaggtgctcccctatctgcacactccttcctgttgccaccaccagcaacctagctcaggccccagcaccacacctcaaggaggccccagtcccagcttcccccatgcagcctgccctcggccctttctatccatggagcttccaaacagcctttgcatggagcctgggattcctcgtgtcactgtgaagaactagaccccaccattgacaatcttcgtgccctggagattcttttcaggttagggatgaggagaggaacatttcatggtggtcagattagatattcactacgtatttattgaattcatttggtcattcatgcttctcaaaacacatccctcagctggtcctctccaatccaaaacagacaatgtcagagatctctttgcaaatcatgaagggcttgggcctttgtgcctcaatgtcacacgcatacaatttcagggggtccatcttcccctcgccctagaccatctatagggcacagtttacctctgattgagctcatgttacaggtggaaagactgagaaagagagaggaagggacttgtctgagaatatgcggaacatttccttctaccaggcactagatcctcgcacaaaagtgctgagtccgctcccaaccccaggcccgtggctttgagcagcaggtcacttaacatctaacgtctttatgctgtttcctcatctgtgcgagagcagctatgtctacctggcaaggctgtagtgagagatcatatcagcataggaatggggctcagccccatgcacagaggacagttcttgtttcattcttttccttgctgtttctcttcctttcctggcagaatatggaggaaggaagcatcgctgccatctacagtggtcacggaaggcttcatggaagaggcgagccctgcctgggcctcaattttgggtgctggagggaagcaggggccaagagttattaatagtcttggcctgatgggcccagggaggctgaatgtgatacagacacccagcaccacggttggggagtacctgacaccggaaggggagggggccggggctacggggagtgccacctcccaaaatagccagagcagaagcctatataggtggccatcccacctccaggctcacttcccgacaggacttcccaccagcccagcctttcagtgcaggctccagccctccacccccacccgaggtgagtggcagctaccgaggttggaggatagagggatgcagcaggatgagccagctggaagggagagctacatctcccctgtccgtagtgacccggggaggggggtgcggtgggggtgctggaggcagggcagctgtggaatgtagggctgagagcatgcattcctgcttctccacccagactcctggtgtggcctggggcaaactccccccacccaccgccccccgtggctgggcctcagattccccagccttagaac

SEQ ID NO: 13780 - DNA, 1743 bp, Homo sapiens
atgaaaagtgaacaacccagaggtaaggacaggatgactaagatagagaaaggacaacaaagatataaatatggctcaaatggaaacaacctaaacatctttagctctgtgaacccaatttagtgaacagtacagtcatgtattaatttttaaaaggtatggcatggggatgtgttaactggtggaccatctataggaataatagtactcttaaggatatgattgctggcactttttctgtggttgccatatgccaggctctgtgttaaatgttttatatcatctccttaaacctcccaacaacccatatcacaatcctcaggagcaaaggaggaattccaggctcagggagtctaattaacctgcccacatttacactgcaggtaatggcatagctgagcttggaatccagttgagtctagattcccatactcttatcactctgctcttcttactggagttccatagagtgtccaattcaggactctacaccctttaaaaaaataaaactggataaaaatctagggattaaaaatcagtaataatgaatagaggattaaaagggaaggctaaagcaatatcatctattccattaaaagacgaaacttcattagtatattgtaaattagaaaaactactaatgaaaaaatacagctactcatgaatgactggattcttgatttttataaaggaattcttcaaggggatagttctccaaatgtggatggcataaaaatatgattgatcaccaactgtctaggcagatttacgaggtcgttctcctggaacatatgacctggtttaactgtggccaccctgaccacaccctttgagtagacacaccctagtgagcacaaagatgagattatctgcaggatagctgcctgtacacattgccagaagtgagatgatttgatatagctatagatctaccacaggaacagacgacttaggggtcgagaagaatgcagtcttaaaaaccttgctttttaaagtgcactgttaactgtttaaagaataaaggaaggttccagtgcccttttctccatcggagtgtcagtagattaagcaggataaaccttttgcctgagtgttgctgcaatatttaaaagtacaaatccaatatttctggtccacgtggatttctatgaatagcttcccagcaaataacgaaaaaaagagagtacgtatgttgtgaagtttgttctgtttattagcaacttcccgcatacttcaactttcaacaattttactctagaggcagagtaaagggatactttctttaggaggtgactcttactggacgaacactcagtgtttccaaaacgtttgtgagatctcagggagagggaagtgttaatgaagctgcagttctcttctcctcccctggagctctgagaggtggctccctacagccattccgttcacctgcttgagttctgttgaaaattgtttcctgcgtggctcgcccccgccccccattcttccctgggaaagtatagattttcacgaacacagggagttctgttttctctgttaaaaacaactctcctttactggagcaggctttgtgtttcacctcaggaaacagagcgttgcactgggaggtaactccgctgggtgaggtgcagcctgtcacctgaccggtctctggggctgccggtggcatcaggctgcattccttgaattcttccacccggcaccggctccgcaatgaacaacttcaggttcactgagctgagc

SEQ ID NO: 13781 - DNA, 1710 bp, Homo sapiens
actgagagccacgtaagcaggtgcagggctttcaggggacagtggccttggctctggctatcacctcaaggctggactctgtacagcccaagaggcagggcctgcctgggagggctcaggaggggctgcagcgtgagcagactatgccacccggattgctggggttgtgcgggcggtaggtgggacaagcccctcccatggcctgtgggtcgtgggactctgatcaggtcaccttagggcagagggaatgatacacacgtggaaacacatgcacgtgttacagaggagatggggtgttgcagggcacagttgcagttttaaacaggagaggccttgctgagaaggtgttgttgaaataaagcccgggagggagggagggagggagggagacgttgtgggaggccgccccaggcggtggagctgcaggtgcagagggcctcggtggcggctcagcgcccttggggagcactgagttgccgggcctggtgtggaaatgtgaccggtttgtgcctggcctcgtcagtgttgaggacctggaggaaacgcagatcttgggtggggagacaaggcggagagaacgaggtgcattggaacagtccaggcgaggggtgctggcctgcttgggggcaactcagaggcctggaggatagatgaggaggggggctgtgggccttgtaggtgttggctgtggccgtgcctggagtggagggacccttgaaagtttggcctcagctcgggacactgatgttcccgggttggcccttcatgagagtttggcctcagctcgggacactgatgttcctgggttggcccttcacagctggtgggcggggggtgctttggggagaggctgccctgcgcatcagggcatcaagacacaggggagtgaatgaacctggggctgcagtttcacctgggtgtggccctggctgctggggaggggccgtggctctgaagcctcatgattggccaggggagctggcatttctgttctggtttgggtcagtgacctgaggtggttacaacgaagtcagtgaggtcattgccacggatgtgggttacaacttggaatgcttgaggctgcagaacccctccccttcttgactgagcagtaagggttccctgctgtggtgcaggaacatgtgggcagagccctgggtgtctccaggtagaggaattttggtttctttttgaccccaggttgaatctccaaattgtcactgccttgtgttctcctccagtaggcagaaggaggtgatattgtctgttgagatctaaagtcctttatgaaggtcctccttctccttccaggagggagccatggatttgctgcgggagctgaaggccatgcctatcacgctgcacctgctccaggtaggtccctgcctgccccaggtccaggacagctcctgggtgcagcccaggggatggcagttctgagggcacctggcagggcttccccaccctccccaccaggccttagttggcacaaatgcctgttcctgaggagagggtctctgcctttctctgggctcagtgggacagggaggggagtctgaggataacccatcttgtcctccgtggctgaggctcctgggttccaaatgggacagtcgccattgggagaggcctctacctccctgggaggtcccgggctcctgtcctgtgggggccaccaaggctctgccaggagaatctgacccctagggt

SEQ ID NO: 13782 - DNA, 1500 bp, Homo sapiens
gctagagtgcagtggtgagaacatggctcactgcagcctcagcctcctgggttcaggtgatcctcccacttcagcctcctgagtagctgggaatacaggcgagcaccaccatgcccagctaattaaaacatttttttgtagagacggagtctccctatgttgcccaggctggtcttgaacttctgacttcaggtaatctgtcccccttggcctcccaaggggctggaattacaggtgtgagccaccgcgcccggcctggtgatgctttctactgaagagtcagttgataggtctttcggggagatcttgtgatgaagaatcaaagcatttgactggggaaagagttccaggatagtcaagtgatgctcaggaagtcagtggagccacgtgctggttccccatccctgctatagcaaattaccacagacttagtggcttaaaacaacacagcttcattctctgacagttctggtggatgaagcctgaaatgggtctcacagggctaaaatcaaagtgtcgggagggctgcgttctgtctgaacgcagagagtttgtttcgtccccttttccagtttctagaggcccctggtattccttgggccatgatctctccttcatcttcaaggccagcaggttagcgtctctcctgtctgacccctattctgtcctttcatctcctctcttaatgctgcctctgtttttatatcttttctctaattttactgcctccctcttggaagggcccctctgtatactctgggctcacccagataaactaggataatttctcccatctcaaatccttacgaaatcccatgtgaaaagtcccttttgccacatagtcacagtcacgggttctagggattgggacatggatgtctttaggggtggagggcgtccttcagcctgccacagatggcaaagtcatgccattgtggctgcagctccattgtccaggctgagtgtgggggcgcatggcgtggttctcatgcccaccacctaccctgaccctgcggaggtgggcaggaggcagcgataatcaccacgtgcagaggtcctgccaggtgcccagcctcatcattccctagaaggcaggcaccaccacatgctcccacactgtagataaggaaacagctttgaaacagatttgaaagtgtttgaggatttgcctggaaggagggctccagagccagggactgggtccgggacacccggagactctctgcttcttggagctccggcaactgcttgtctttctcttcacaggagaagggggccctgctgccgctgccgtggggcggggcgtgggcggtgctggctgcaggaaggctctcccctcccactttgtgctttccctgcaggctgctcctctgtcgagctgatcacacccacagttgagctgcgctggccagagatgcctgcccacagcctggtgatgagcagcccggccctcccggccttcctgctctgcagcacgctgctggtcatcaagatgtacgt

SEQ ID NO: 13783 - DNA, 1500 bp, Homo sapiens
cgacaaatcaacagaacaaagaaaattacctaaacagcaaggacatagggaggaacttcttggcacagaactttccaaacactttttcctgaagggatacaagaagcaagaaaggtactctttcactaggaccttctctgagctgtcctcaggatgcttttgggactatttttcttacccagagaatggagaaaccctgcagggaattcccaagctgtagttataaacagaagttctccttctgctaggtagcattcaaagatcttaatcttctgggtttccgttttctcgaatgaaaaatgcaggtccgagcagttaactggctggggcaccattagcaagtcacttagcatctctggggccagtctgcaaagcgagggggcagccttaatgtgcctccagcctgaagtcctagaatgagcgcccggtgtcccaagctggggcgcgcaccccagatcggagggcgccgatgtacagacagcaaactcacccagtctagtgcatgccttcttaaacatcacgagactctaagaaaaggaaactgaaaacgggaaagtccctctctctaacctggcactgcgtcgctggcttggagacaggtgacggtccctgcgggccttgtcctgattggctgggcacgcgtttaatataagtggaggcgtcgcgctggcgggcattcctgaagctgacagcattcgggccgagatgtctcgctccgtggccttagctgtgctcgcgctactctctctttctggcctggaggctatccagcgtgagtctctcctaccctcccgctctggtccttcctctcccgctctgcaccctctgtggccctcgctgtgctctctcgctccgtgacttcccttctccaagttctccttggtggcccgccgtggggctagtccagggctggatctcggggaagcggcggggtggcctgggagtggggaagggggtgcgcacccgggacgcgcgctacttgcccctttcggcggggagcaggggagacctttggcctacggcgacgggagggtcgggacaaagtttagggcgtcgataagcgtcagagcgccgaggttgggggagggtttctcttccgctctttcgcggggcctctggctcccccagcgcagctggagtgggggacgggtaggctcgtcccaaaggcgcggcgctgaggtttgtgaacgcgtggaggggcgcttggggtctgggggaggcgtcgcccgggtaagcctgtctgctgcggctctgcttcccttagactggagagctgtggacttcgtctaggcgcccgctaagttcgcatgtcctagcacctctgggtctatgtggggccacaccgtggggaggaaacagcacgcgacgtttgtagaatgcttggctgtgatacaaagcggtttcgaataattaacttatttgttcccatcacatgtcacttttaaaaaattataagaactacccgttattgacatctttctgtgtgccaaggactttatg

SEQ ID NO: 13784 - DNA, 1499 bp, Homo sapiens
agagaggctccacgtgctaaaggaaagcggcctgccagacactgctgcttaaggagactgtctaagcaatcggattcggtgcggccgagatgcagacgtccgtttctcccaagggaaggagcaagggtactccaggtcccaaagctgcgttacagccagttgggctaatcctacccgcccctcccccaactccccgagtggcaatctgtccagcccctcaagcgatcaggccacaacccccagcaccgcgcgttctcctcccagcctagcccggcccatctccccacccggggccccgccccggccccgcaggctcccaagaggcggtggatgggccagcgggactacaagtcccagcaggccccggggcccgccctcgtggggcggagccaagccagcagcgaattgggaggagccctggcgctcaggctagggaacgcgtgtggccaatcgcggggccgttctcgccgcgagccgatgggggcggggaaaagtccggctgggccgggacaaaagccggatcccgggaagctaccggctgctggggtgctccggattttgcggggttcgtcgggcctgtggaagaagcgccgcgcacggacttcggcagaggtgagcacgggaggctgttttcgctggctggagcccgctcgccctaggagcttcctgcctccgtcccccaacccggaaccgccttccccgacgcgggctcggtgcccacgcgccctgctcggaagttttgagggtcttagctttaggttagccttcgcccggggtcccggccggtggccgcgtgtcgacgcccctcccctccccccgcgcgacacacacatattccagttcctgggagtttgcatggggcttgccgccatccttgcctcttctgcctctgccacattgcatggtccccctcctggcgcgcctcacccctcccgggcacagctatcgaggctcctcgggctcatcgggacgccttttggctccatccgggttcccccatcggatgccgggacgggaagtagagaaagcggtggcgactggtcccactccgattcctcactggccgggctcaggcccttcttggttccgtgggtacaaaattgagctccacgcccaagtggagagaatgagctatgcgcgcctccggggcgggccacgcggggccaggctgccccagggtgcccgaggcctcgcctcgtctcgccgcgaggactggaatctcgcagcaaggaccctcctcgcactggaggtatcgtcgagtccagcccctaagtgacagatggccggggtgccaccccacccttgagctgacgccaagtctggccggggaaaggtcctcaaggggctggaggatgctgccgccgccctcctgtcgagcctggcaatgggccagtcccagcgcctgccgcggtctccaaccttggcagataccgtgcagtgccgagttctgccgttatggggtccctggaggtcttcctgggaagaggattttggaagag

SEQ ID NO: 13785 - DNA, 1498 bp, Homo sapiens
catgcatttttcaagcctttttcaaacatggtttgcattgtgtttgccaaagtccctttaggcaaagcaagtcgcatgggcaagcacagcattagtgtggaagggcactactgaagagcatggaaataggaagaggaggattcgaggccaattttgcaatctattccagctccttcagggaaggggagtgaaaagcattccttctctgtagcccaggaatgccatgggccagggcaagctccagatggggatccttggaagaggtgactcgggctccaggacttccttgccctccaaggctaggggtggcagtctggattctgatcccaccatcttctccacatggagaaggtgcaggagcttgagccgctagagggaagggcctccttggcagggaggaaggtgttctgaaccctcactcctatcacctttcagcccaccccaaagtgatgatcaggcttaaggaccccccagcatccctttggtagtgaaggactggattgttctgaggcttatgcctcatcaccatggtaactggtgccacctgctccccaaggtcaagcaggaatccctgtccttccctttcaggggggtgacagtggcctcagcctgtctcttccacaggtggctgcgctggagcggcagatctttgacttcctgggctaccagtgggctcccatcctagccaacttcctgcacatcatggcagtcatcctgggcatctttggcaccgtgcagtaccgctcccggtacctcatcctggtacggctcacctagccccttcccaagccaactcctctcctcacccctgcccactccacccctccctgctcctcaaaaccagaactgccccccaacactggggcactggtcttggctccacccaaaacaagatggggtgaatgtgcacagccccatgcttctttgctcagaggagacaagggttttttttttcctgaagaattttttagggaaataatccaaatataaacaaaatggatcatgtagtgagtgcctggcacgtgccaggcacgctgcgaaatttcacatgcttcatctcatgtctacaatagccctgtgaggtagatcttaacagctccattttccagatgaggaaactgaagctcagaaaggttgcgagtcttcctaaggtcacacagctaatgaaagcaaggcaggattagaacatcagatcaacagtgaaggctcctgctgcggcaccacacggcctcaggaaggggtgggcgcaaggacacaggagggatgggcttcatcttatttagtttctcaagaagcttcaggaaggcttggcatttgtctctcttgcccgatgtacatcaaggatgtgttctggagcagctagtgtggctttgaggtcagtgcctccctgcactccagccccaggagtctgggtctctctcctcctccccgacagcctcttcccaagtcctggtccctgatagtctctgtcaaactcctgctttcagctagattcacc

SEQ ID NO: 13786 - DNA, 1496 bp, Homo sapiens
ttggggaagggctattatcatttaaactataaaccaaatgtctcccaaagttaacttggcctaagctcaggaataattaagggcagctaaaggcaagatggggttggttaaatcagatctctttgactgccataattttctcactgttagaatttttgcaaaggctgtttcattagtaccctactcatttaggtgaaatgaacaatgtgtattttatgtgttccagatgtgtatcaatatcacataactgtcagggagggccccaggtatctgtccctgttcagaaagatcatgaagatgaataccgcgatgaggacagcttgcccgtctcagcgaactcagaacttgtcctcagtagccagcccctatgggccaaggggttacaaacttcgacttgccggcaattacagctgttttccatcattctccttgctgtaccttctggtgggagcagcatgggagttaataaagggaaagcgacaagcgtctgtagagcgccgggtggggtctcgggagaggagggctgggtgggaagaggcgcggcgggaggcggcgccccggctcgcattggcccagccggcgtccctcctctggaggaggccgggcgcgcccggaaaagtggtttgcctgacggcgagaggcagaggtgccctcggtgatagaggaaacatggccgagtatacgcggctgcacaacgccttggcgctaatccgcctccgaaacccgccggtcaacgcgatcaggtaacgggctcggtcgcctccagcccggggaccgtgcgggccttagccgccctctggctccggaggctttgactctcccccgtcggtttaaaccgagaaggacactcaagagttgagcaactggtacatgccaggaactttttttttcttttctttctttctttttcttttctttttttttttttttaacctagattagcttggttaatcttcgcagggaactctcgtccccgttttactgataaggaaactgaggctgaggctgagacagatcaacacttagggagttggcctcgacctgtccttcatgcggagccctcctgcttacttgcaactttggctttgcaggccgactttttatttttcttttttttttttaattatactttaagttttagggtacatgtgcacaacgtgcaggttagttacatatgtatacatgtgccatgttggtgtgctgcacccattaactcgtcatttaatattaggtatatctcctaatgctatccctcccccctccccccaccccacaacaggtcccagtgtgcaggccgactttctaatccaaaggtcttaacttagtttgatgttggactttgatccagcctcactccccttctttgagtccaggctgtccttacaatgtttggctaaaggctttaggaatagggcaatcactggcattagtgggactttttttttttttttttttaatgttaaaagtcccactaatgccagctcagtgattaaagc

SEQ ID NO: 13787 - DNA, 1495 bp, Homo sapiens
ccagagagcagacgaatccacgggctctgtgtgggagtgagggaggccttcccggctttcacatccaggtgcacctgagccccgatcccccatgagtctgtctcaggaagtaaatggcaaaagcgctaagtagatagccccagaggaggaggagaattctgaattctgtttatagctctgctcctattttgttttctaacctcagaaaactgatttatccttgggaagggtcagtttcttcattaggacaatgaagaaaaatccagctgtcccttccaaggggaggtatcatgagcagtatcaaggtaagcaagggaacctggtttggaatcctggttgacaccggctttcactttaagaagtcgcaagagactgccgcaagagaggaagccacagaccaggttggaccctgagcctggagtactgccttttctcttctttgcctgctaaactccttgcttgtcaagattcagcagagatgacaccttctctgggaaggcttcctgagtctcctgcagtgagcccctaggctcccctagcccttggctcttatgtcttatctctgagaaatctgagatctgcacttttgttagaagtccgttttaaagacaatcttttaaagtgtacaaatagaaaccttatcttattgtattgcaggcctatctcctcccccggtgtgtatcaatgctcaggctgggcctttgtctgctggcttgtggagggaggcaggacaagccagtgaccacattcctgcactctgggctgcctcctgtggggcccgtgaggaagcggcagccttccctgccgcgtgcagggcctgggttgtgtgggtggctctcccgagtctcctccagccctttttgggtctgattctctgaccctcctctctctccttgctcaccacttggcactccactccttatccttttgctgcattaagtttggaaagagattttggagaaaatatagcccatcaacgaatttctcctcctcccagggcctgtctaggcgtgtgccatgcccaccctcttcctttccagcgctggccacatcctccctgcaccttcagtgcctgctttccctgcctcttcctgggctccgggtctgtgtccacagtgtcctgcgtggccctcgcgctgcctctggttgcccacattcctgcaactctgtgaccacagcaggggcgattacacattcctggcctggcagccaacagtgtaaaaaagaacagaatgtcctagggccccgcctagcccccagcttcacctgggcccctcccgggtctggacaaggttggagggggtggcgaggaatcagcaggaaagaggagggaccaggaggaggcagacgcatcccacctgagtgcgctgctcccacttagtgagcggggaggagacctgcagagacctcttctctcttctctgcagggcctgagggtgaggctgacctgtgggtgcccttggagggctgcccacttgctgagcctctagctcct

SEQ ID NO: 13788 - DNA, 1495 bp, Homo sapiens
gttcgcttttgtgccgacctggaaacactctgtggtgctctagattgttacaaagttcggggtggtgcagccccagcgcgccccgctccccggcctgcaggtggcatacaagtctcttcgctgtcgggattcgggactgaatctctgccgggcggcaaccccttcccccaccgggatcaccgggaaagtggcaccatggattctccatctttgactgtggccacgcccctctcgctgactccgcccatcccacgggaattggcgtgtggcgattggaggcgtgtcgggggcggggctgggggaggtgggctgaggaggcggggcctgggaggggacaaagccgggaagaggaaaagctcggacctaccctgtggtcccgggtttctgcagagtctacttcagaagcggaggcactgggagtccggtttgggattgccaggctgtggttgtgagtctgagcttgtgagcggctgtggcgccccaactcttcgccagcatatcatcccggcaggtaacctcaggctccaaggggcggccccggtccctggctgtggaggggtggctctaattccgcagaaggcaggaatggggtaaaggaaaaaagcgcagatcttgggtgtggagggagtcaaggcctgcgtgcaaagaagggaacaaatccaggtattgagaatgggaaaagaaaagggaaggaggggatgctggatgcttggatatgcagaaggtctgcttttgggcctgggagggagaaactgggcggtgaggaagttggatgcaacgacaaggggaaaatcaggtctgcacttgggttggaaaatcgaggggtggaagttgcaagaatgcatgtagaagactaagcctggagtgtaggaggaagaaaacgtgcagcagctgggggctggatgcaaagaaggctgtaagccgcagacgggcgtctgcaggcaactcaggcggcgaggaatagccttgaagccgatccctcgcgtccgccagggggcgtggaggggcggagctccagcggccttcagaggggtcgctaggccacacggggcgagagggggctgggggaaacacccccgccagttccgggtgcctggagtttaaaaggtcccagcaccagcgaggggaggggaggggaggggcgggcgtggagacctggaaggaggtaccgatccagccttgattgcagccctcttgcacaacggccataaggacgggtgcaggccaagagcaaggacatgcaaaccccaagacctgctaacgggcggcgaagcgggggcacgccctcgcacacgcagagataaattgtgctcccatgacctttatttggaaagtgcctgcgggcctaaaattggcctttgtcccaccgagtacactcagcactgtactttaaaccggataaactgggctgtctggcaggtactaaaaacagctaaattctcctgtgagtgttctgtatgttaacacttttattccttgttttgttttaggcgat

SEQ ID NO: 13789 - DNA, 1493 bp, Homo sapiens
ttgtctttcaccttccactagagtttaagttccattagggcatttttgttctttttattcactgctgcatccccagtgcttagaataatgcctggtacataatagaggctcaatatgtatttaacaaatattaaattaatgaactgtagttatccaaatcaataaatagctttcgtttatttcgctaagagccctcggacattctgatcattcagcgtgttacctatttcaaagtagtcaagtaactgccatcttagagaagccatcttcttgtattctgtgataatagcgaacgcttattgagcacttattatgtgcaagcacggctccaaggtatcataatagtactttagggccttaggtattacaatcggagttactttccgattatatgtacattccgagatacgtataaaaagtatttgttctttatctgaacttcacatttaactgggagtcctgctcttttttttgaaacaggttcttttttttttttttttttttttttgagacagagtcttgctctgttgcccaggctggagtgcagtggcacgatcttggctcactgcaacctgtgcctcccggcttcaagcgattctcctgcctcagcgtgtgaggaaattagaatgcagggaggtgaataatttgttcgagatcttctatgtgggatgatcaatggcaaagatgggtacagaacccgcgtccttaactaaacgatggcactctgctggctcgcttttagctccttgtgttttctttctttttggtggttaacttgttttcgtcaagccctcaattatttaaaaaaaaaaaaagttcttaaggctcaaagtcaaaacctgtcaaaggccaagtgctttatttccctccagtcaaggactgggcattttgcatttgaatcctggatggcgggaagcagcaagcaggtgtcaacaggggtggggaggagacgccggaccccaccagccaatcagagcgcgcagaggcctcccttcccccgccgccgtcccgcgccaaaattccaaacgggctacgcaccgctcccaccgtctccttccgccgagctcagcgagccggaactatgtgaagaaaaagaagtcagcgttttccccaggactctccgctcaggtcctctatactgtcggcctgtgttcctctccacgttggcccggcctccttcgctctacaaatgggaggagagtttcgagcctgctgttctacggtggtggcgtgggcgggacagacggcggagggattctgggcgcgcgcgctgcggccgctggcgcggagcttgtggcgccagaattcggagcgcggaagagccagagctgcgagcgcctggagctggatctctctccggtcgcgcacgccgaggccagtagggagagaagatggtggttctccgcagcagcttggagctgcacaaccactccgcggcctcggccacgggctccttggacctgtccagtgacttcctcagtctggagcacatc

SEQ ID NO: 13790 - DNA, 1493 bp, Homo sapiens
ccttccttagtacgtgcggcgggtgggtagagggaggcggcgcgggagcgggaggagcctggcgggcgctcggcagggcgctcccccagccctgtctcctccccctcttcctgcccccgactcccccgaccccgggcgcgcggcccacgccctgccctcgctcccggacccgcctcgcagaggcctcgcccgccccagacagagcgttcttgtaaacttctcttcagtagaaacggtcctgctctcgaatatttcagggcatccccaccctgagcctgcccttcctctcgggtttggttttagaaagtgtacaaatcaaagaacccggccgtcctgcgggtggggcacgctggcgcagaaccagaggtaaccggctctgcggccacctacgggtctaggaattacttgctggatgaccctgcagggagtggcacgtggagtcctatcgacctcagaggcactatcagattagccctaggaggtccgtctgggggtctcggcggcctgcgccagtggaggggcggcacctccccagaagccgggcttcccgccccaccggcccgcgaggtgccgcagggagggtgcggtttggcttgtcagcacccaggggcgtcacaaaccctttgttgaacaggggatttacccctttgtgtggcgtcacttgatcaatagttcagtttcagtgtggctaatagtgttaaaaactggccgggcgcggtggctcacgcctgtaatcccaacactttgggaggccgaggcgggcggatcacctcaggtcaggagttcaacaccagcttagccaacatggtgaaaccttgtctctactgatacaaaaattagccgggagtggtgatgcgcgcctgtaatcccaggagactgaggcatgagaatcgcttgaacctgggagacagaggttgcagtgagccgagatcgcaccactgcactccagcctgggtgacagagtgagactctgtctcaaaaaaaaaaaaaaaaaagaaaaaagaaaaaaagaaaagaaaaaggttaaaaactaagtttccaaggcagtatgctgtggtccttgaaaagtcctttagaagaattttctggaataaatttagagaaaacctaagtgtttcctaggggatgcttaccaactcctcgcccctcccccgcccgccctcttttattttaattgtgactcagggttaaatacaaactactagcagctgttggtggaaaagagcccaatcccaaactctggggttttcctttgttcccaagggaggccttgggaggaatgaatgatcctaaaggaatgagcagacctggggaatcctccaagtgccacctctgactaatattggctgttgccaggaaaacccaacttggatttcagctattactttccgtgcaaccctggtgctgactattcaaggggacagctcttcaagatcttcctgtatacagtacttcccagtccccaggtcacagtcaccagtggaggaaatctc

SEQ ID NO: 13791 - DNA, 1491 bp, Homo sapiens
aagcagacagagaaagtgtgcagggctggggttctggcccgggcagacgggaacgcggacacatctagcactccgagtccgtcaaggcagcgcgagcgctgcgccgctggaacaagtcaccgcgaaccctaatcccacccctccttaccctattaacgacagaaagcctcgttccgctggtccctgaacaaaaactcctaccctactagtacacagcccacaacaatgcacgctgccggcgctacagcccctaagcaaccggccggaagtcggccccacctcctcctgatgtcacggaaatgaagggcttcgcagaggatgtcccgcccgctcccttcagacgggcgtagctggcaccttcctgagatatgcctgcttgcccccgatttttttctccttgcagtgagaacctcctcatgtggcatctttacttattctcttcttggaaaatccatgtgacctccccgcgcttaaagtgtttccacgttacaggcgacttaaaggcagccctggagcctgacgtataattcgagcgccgatgcagaaaggagtcaggtgtttttttttttttttttttggtttccggttctgtcacctccaggctgagccgggctggcggaagaggcacgtgcgctgctgaatggagctggtcgctggttgctacgagcaggtcctctttgggttcgctgtacacccggagcccgaggcttgcggcgaccacgaggtgagataccgcgtagttagagacagtcggaggcggggccgggaaggtcgggtttggttcctacacagcagaggtgaacattggagcgcctgctgttcactggatgatttgatgaatcaaacctaagagacttaagagaaaagctaaccttttaaaccgtagaatggacattttatcaaaatgaggcaatatctgccttttctagtagacaaaaggtccacgggacacaaaggaaaccggcatttctgcatacggacaaatgagtcgtagattgtggatttaaggatcgatcccataagttgacagtattcagaatttaatgaaagaagatctcgctcttttgctgaatttctgccctggaattttacaaattactagaactagattaggataaatcccttataggtaaagcgataccaattcattatttgttgggaacttatggcgagctgggcggtggagatgcaaagatgctggaggtatggatcttgccttagagacgttgcctacataaggggtggaggactgaggagacgcatagatggagagaaattacagcagaatatgatattactagatgtgtgaatagataaaaaggtcaaataaattatcagtagtcaaataggtagataggactatactcacgactaggaatccgacctcctaacatctagctcacttttattcttgaagcaattctaagcattttctagaaaattgagtacagtacttctttatgaagtcaaggcgtcggtctttaattatcc

SEQ ID NO: 13792 - DNA, 1491 bp, Homo sapiens
acatgatgggagctggagaagtaggtaggggtcagaattcagaaggccttggacaccagcctaaaggcttagagttgctcccattggccatgcactcaccaaaggtgttcacgtccctcttttggctgttagattggatgggctcaatcttttggccctctgtctctagaatagagccgctgcttttctactgggcccactatttcttcctggtcctctgatccccttagcactacacagatctcgatatttgcctcgggtatcaaggctctgaaaatgatcaggatttagaggagatggctcattttcagaaagagttttatattctccctctggccttatacactacaggcaaatggcaccgatgttttggagttgggccagttgggccttttctcccctcaagagaggaggattcgatattcagtgtttctgaatttcatgcttagttcttaagccatttcccatttgccctaagaaataagagctggcagcaagctgcgctgtttttttctaaacgggaaatgggttaagcatttgtgatcaccactgaatgagtgccagagctggttagtgatcttcctgttcaatccgaggtcacctaactagataacaaagagctgaaactaaaagtccggtctcctgactcccaatccagtactctttctggtgtgctccagcttctggctctgcttagccaattatggaacagacagaatgtacttggctgccccaaacggctaaagggcagttctgttcccaaaatggaattctgttgtgcctcaagctaggcagcataattgtgtgtcttttggtaactccctgtcttcttctgtaaaatgggagtagagcctacttaatcctgcagctacttctaagatcagggattggggcgtggtgggctgttctgcagctgttttgtgatggatgagggatgatagatctatgttcaagtagcggaatcttagagtcaggagttggaaggaatcttggaggtggtctgtggtgacaggaagcctcttccaatagactgaacacggaagacttcctagagccggaggacaagggtttctttcctcttagcagtgagcttcttgtttttggaaatgctcaagccaagaatggatgttcaggcagaggggattccgctcggaaggggctttctgcactgaagtggtggccagcgggaaactccaggtttccaactcctgcacaaatcctttctaatatccatccactcaggtgagctggcagggcagtagctgtgcagggttcagggtcattatatgtcaatgaccttcagcacggattactaacaacagtaacatccgttaccgtttactgctttcctattaagcaccatgcactgtgcataacatgttatctttatctcatatctagaattttgggaggtactttgaatcattacgatctatctacttcttaggtgaggaaatagaggtttaaaatttagtccacagtctcgcaagg

SEQ ID NO: 13793 - DNA, 1485 bp, Homo sapiens
tttctcctcctccctagtgttcctccccattttttcagaaaacacttctgactcctgtcccttccccttctgcttttggtcagtccctgttcttgagcctcttttctcctctccccaggatgcagaaagtggtgaacccaggaactgaggaaggaggtttccagttcatttacattaagggccctgggggagaataaagctcagagcaggagggagtaaggaaacatttcctttttgtttttatttggttggagtttctcatatttgaaaacattgcggtatccatgatttggccttgtggagggtgttcctaggtagaggtgagaatggggaggcaagatctcaggcaccaggcaggaggtgccttgtaagctaactgggcggaggtggaggtgcagtgtcaactgtggctctgtaactcttcaaaggcccagtttcccctcacgcagcctcttaggtagcgtttcccctaatcgtgggggttggaccccagagtcttccaaagaattttcactggttgcctgcatctttggctctgctgtgatctgattggaggagggacagtttctggtacccatcctctgatttatacatatgcattttttcccctctggcctttagatggcctcagccccagccaccatatacccctgcagtttgcactttaattgatggtagttcagttggggtacttgttttatggaagttttgattgatttacttgccctcccaccttctttttaattcaatgaaatctgaggttaatgcgaggttcgaggagaggttatagataaaactaccagtggcagctactcaagtcctatctccactgttagcttcctccaactctaattattaacctatattcttgccaagctaactattgactataggtttgcctttcctggagaattaattgagcaattgaggagtgtctcaggatagcacaggccaaggtaggggagtaaaaaggaggtcaggcaaaagggaggagttttctgtcctttcccaggtttcacactcaatttgatatccattaccatgtcttttctacttccttgtaaataggtatgatctttattcccactgtacagtctgttctatcctctgcctcccatcaggccctgtttctttgttcctttgttaatatcttgaatttagtccctccatccttaatccccccatccctccccatcatgcaaccagtggtttaatccatgtaccaataggggctagtaccacagaggcctcctgtggtgccctcgtatcataccacctgttcctgtggagagggaatgaccggcactgaaggtaccttacaactggctcatattatcagaggaccttggtcctttctaaatctctagtctctcttcatatccttcatcaggtgttttaagatgtctctgagaagccatcaaggcaaaagagaactttaagttccttgttccagcccggagttttgggaaagaaagaaaggaaagg

SEQ ID NO: 13794 - DNA, 1484 bp, Homo sapiens
acaaaaatttgcctgcatggtagcatgcgccttgtagtcccagctgctcaggaggctgaggcacgagaatcgcttgagcctgggaggcagaggttgcagtgagtcaagatcgtgcctctgtactacaatctgggcaacaaagtgagaccctgtctcaaaaaaatgaaacaaaaacccatgggccaggggactgtggcctagcccccttaaatactccagtcctgtggtcaacagcctccccattagcaagctctctaaatactaaggaagaagcatccgggaataaacacagaagccacaagatccacccactcagacaattaactagtctagagtctctcagtggggggaatttcctcgcattcttccttttctcctgctttcttttctttttccttccttttttccttcctttcctttcctttcgttcctcatgctctgtccctgcctttttcagttctcccttctcgggaggaagtaggctgctttgcagcatgcagagcggaagtcagatctcaggaaggacctccagtctgcagattgaaagaactcttgcacagctgggagagacagcacctgggccctcattccaggcagagatctgcctgcagcccccagggaaagtccactcacccacgggagcctgacgggctgagcatttttggaagtctttgggagctgctgtgtcacagcaggcagccagaacaatggggctctttctttccctgtgcaggagacaggcccacagacagggcctcacggctgggacaaaggccccagtgaggtcaggacagtgctgtgggagttgggggtgtgggggaggaatggggaggtaggtgtgtggtagagcagcctggaaggaaggaagctggagaccctggcagataagttggggctctctggaaggccatctcatcaggctgccaagcccctcggcaatgttcaagcccctaaatctcacccaggctgcgtctcttccctccatacacattctgatctccttcattcccaggaaactgaaaactctgcgaagggacccctgtttagacgtgggaaggaggctgagagcttaaccacacatgcaggggcttggcaggggcgagcacatcgttagattagtgctgtgccctggaggcagaggcagacacagatgtggcccctactccacatccccagagatggggctgacactctatgaggggccaattcctcctgcccaaggccaggataggacacacacacacacacacacacacacacacacacacggactgggccaggggttggactctgtgcaggacgctgagtcacccgtggaccagctccgccttccccaggaaacccaacaaagccaggagagggcttccgtttccgggccccgccagaacaccccagcaggtgtcagggacagggcagtattccagcttcagcctgtctacctctggagctctcctgatcaatacatcagagaagatgatggagcc

SEQ ID NO: 13795 - DNA, 1483 bp, Homo sapiens
gcctgtagtcccagctactcagaaggctgaagcaggagaattgcttgaacctaggaggcggaggtggcagtgagctgagatcgcaccactgctctccagcctgggtgatgaagtgagactctgtctcaaaaaataaaaataaaataaattgatttattggggggaacttacaaacagaagcttggtcttaggcagctggctacaagacaggtaaatctctgcactgcaatcgcccagacccaggatgtgtatcttgaggaaaaagtatctatactctggaaggaatatgtaggtggctataagcatcacagcctatgatttctacaacattatcaagggttgttttgagggaaacttacaatgaataactgttcctacataaacagtaatacatcacctagacattttggaggcattcccagacttggggttagtcagcagattagcatttaaaataaagtcacttatgtccctactagtgcctaaaaagcatttagatcaatgtcagcataaaggagactggactgcaaaacagaactgtgtgcaaagggaatttgttgaaataaacaggctgcaccctctgggacagagaagcatggtcacctgggaaggagagaaaagggagcttgggtcactccagtatcagcagccagctcagaaatgtagacctgcacaaaataatacccaggcagctatgagaatatctgttgcagccaagagggcaccctgccttctcttttcatatccagtgaagactgtccctctccgtgacaccatggctggaggaagtggatacaccgtgcctgctgcatctgagggctgaaatgcaagatcttcaaaggtcagccatgttcagggcattttgctcacattcttgaggacaaaaattatgcttctcggtgtagcagaacaaaagaggggagttgagagtaaaatggctagaaggatgggaatttttaagttccagccattgctgcattgagaacaccagaagggtgttttcagaaaaaaaactgcttattttcttctccctgcctgcttttgtttttaaaatgttttaatggaacctctgattatgcaaaaggaaaactccagcccagctcagcagagatgactgagataatgtggaactaaatttttctgtgcagtaattcatctttgtgcagatagcatctggcaatggaggctggttgttttcttctttctttttcttttttttttgagacagagtctcgctctgtcgcccaggctggagtgcagtggcgcaatcttggctcattgcaacctctgcctcccaggttcaagtgattctggtacctcaacctcctgagcaactgggattataggtgcccaccaccacactcagctcatttttttgtatttttagtagagacggggtttcaccatgttggtcaggctggtcttgaactcctgggctcaagcgagccactcgcctctgcctcccaaagtgcttggattacag

SEQ ID NO: 13796 - DNA, 1476 bp, Homo sapiens
tggcaacccctctaaatattcctctagtgacttgtgctctacattctggctggatcagagccctcctgtggcaaaatattctaaagatgttaaaagagagagagagaaaaaaaaaggctcaactaataaatctattctaaacgactgagtcatttgttttgattacccgggtgattgccaaatgttaatttaaaactgaaataggccatgagctcactcccctaacaatgctgagtgtttgagctaatacggcttgataatgagggagccagatccactgccagtgctcatgttatatgataaacagacatttggagaagtatgcagaacatcttggcagttttcctttaactctaagggttgtaaatacaaagtagaatgtgttaccatgagccatttcataggaagttgactttatttttttagaattcagaactttgcttctaaaaaggtaactttgcctcttgattctcatttttttccctaacttaggcaccttggaagttgttttcaaccatatccagcctttgccgaatacatcctatctgccacacatccagcgtgaggtaagttttactaattgccacaaattcttacactgatctccaaccttctaagttgtggtattaggggcggcattgtacaaagggctttatttgtaccaggaggtttcagaaggttcattttaattgactcaaccaatgtcactgcttaccctaaatattagctctcgggggcaatgtcttttcaagggaaaatctcatttgctttcaacttgggcatatgaaaagggaatttgccaggcacaacagaactatttgaatgtctgctttaaagtaaagatctgctcatgtcgttgcacgaacagtagggagcaggaaagctgcatggagcaaatgctgggatgggacagaggagactcctgctgccagccacgagaaggttaggctgacctgatcagctattaggaatctttctccctgggtggaaggagccaaggtgcaggactggcattgcaaaatctggtgatagaaggccaaagagtgcttctgctcggtgacattaatagggtccaggagattttcttctgatttgccctcaagttcagaacaacctgtgggaagccagtgtaagaatgcttatactggataagcgttctctgtcctcttcatttagccacagtggcttgtttatactctgtgatgactcagggttcctcaattttctctttgagagagggacattgacctttgaaaataatgaaggaatctaagagaaggctcatccaggcacgatacagtaatggtccctcctttttggtgccccggtctctgtgcgctcacaagagggaatgtaacctttgccagcaccatacctgtcaggctttgccatttcatccctcaaaaggttgctgcgtttttgccttcaccttcaccctgcccacccctgcatgcagccacatggtcagtgtaggta

SEQ ID NO: 13797 - DNA, 1468 bp, Homo sapiens
actacattatgtgggacgtgggtggtgatgggttgggaagctactggaattaggaggagagcttgaaccagcttgagacaggtggaagtggaaaggaagggtattaaatacaggagactgcccagtatttagcatgtgattagctgaaagtgtggcattatgaaataaagacgttaagacaagttgatttgaacttagaaaagagtaaaaataatgagtttacttcgaggtgaaatccttatcttcatcattattatcaccattactagattccaaaggaatacctgcaatttaagaaactgcaaacgcacgaaactacataactggtaagtattttaatgcatttaattaaaaattttccttatgttgctttggagttagtttttaaaattcttttcgttcataatcaggaaaggtagtaaccttacattcagcgacaccttagaaacatacccttttaacgcagcacatttcaatacagattgtgctgttccttttccaaccaccaggtggcgggcaagcgcccaagtcgcactcccgcctcatccaaggcagcctgcgtggctcccgggagcgcgcacgtcccggagcccatgccgaccgcaggcgccgtatccgcgctcgtctagcagccccggttacgcggttgcacgtcggccccagccctgaggagccggaccgatgtggaaactgctgcccgccgcgggcccggcaggaggtaagggcagaagggaagcctcggggcctattttcccggtagcgactgcctcgggggagggcctgcgggtgattcctgcgtcgcgtccgttcctgcccggggacgctgcggaagcggtcgcagaagcggcgagtacgctgtatggcaagcgcatattcttcccgggcagcacggcggctgtgagctggaattcagcgcgggcggtggggtgattgcggcgccccctggtggcagtcctccgcgcccctcccctgactccccctccctcccagcctcacccccgcgccgttgcagcgctagggctggatggcctgcgggtaagcggcagcaggcgcctagtgggaacccccggcaggaagttagcatgggcggaccacacgggggccacacatgacttgtgaagaactactggacagtttggggaaatgactaccacgaaaaggcttactttcagttttgtttcagactccttttccacaatgtcatcagaacaatgggaaaagtcgattttttcccattcatttccagcggtgtgaaatgtgatcacatgttaattggttgcccgtggtgggtgtgaagggtcttgtcctcgggaagtttacatgatgattggcaaagatctatgtagagactaaatggactggcagggtaagagagtatggagagcgccaaactaaataaattttatactgtgaagactcacaggtcaaggcgtccctggagacctggctcttctggactccctactct

SEQ ID NO: 13798 - DNA, 1468 bp, Homo sapiens
gactgttggtgtcaccccttatcctgaagaagaggcactgagacaggacaagggtgggtgcccaggagggctggcatgagtcatgagaatctggtcccggagaattagacggtgtggggaagtaggggtgttgggccgctttctggcctcatggatgccaatgaatatcagcaggtggctcccagaaaggaactctaggggatgcctgttgctctaaatagaggctagagagggcactggcagttcagtcaaccaagaaagggggcccacttgcctcagcttcaggctttgtacacatcctcagcctttcttgagaactgaatttagattctcctcccctgtgctgtgtgcttggcccagaagaagggcaagtctcgctgggtggctgcttcttggcctggctgaaccagaaggccccagtgccactccaaacctgggtgtgagccctgcccccatgagcaaacagtagctcagagctgggggctgtgggggtcagtggcctgtcacatgagatctgatgaggccatctctgctctatattgggaaagggatcaattgtatcaagggctttcttgggagtgatcactctggccattggcgagagacctggcattctgacaaggcaccctccataccctgacccacttgccagctccagctaattttagcaggctttggcaggtgccagcaagtacatagcatgtggatgtcactcccaggtgagcccaaggagaggcctgggccagagcctggaagtcatggtctatgcccatggaggcacccaaagcaagcctgaggcctggactttgcagtcacaaaattaagaatgatacccctgttttttgtttgtttttgatcagttggccaccttcctccaccaccccttccccaagttccatacagacccctggattgtatgaaatgcaaatcgaacctctctgcagatgaaaatccactggggatccccttgcctccaagagcaagtccagacctgcaccagcgcgggccaggcccccttaggaccccctccctgtccaagggcatttcagtaagtgttctgtggccaaggcagcctggtgactttctgcccgcacaaggctgaggaatggaagatgggtaggctggctctgcacaccccctcctgctgggcagcaatccctaccccatgttcacagagtgtggccggctgccccatggctctgtccccgtggccctgtcaactgttacccacatggcctaccctccctttctgccctgcctctgaccccatggcagggggcagagtatttgagcagccgccaggctgagccctttcagtgcagaagccctgggctgccagcctcaggcagctctccatccaagcagccgttgctgccacaggcgggccttacgctccaaggctacagcatgtgctaggcctcagcaggcaggagcatctctgcctcccaaagcatctacctcttagccc

SEQ ID NO: 13799 - DNA, 1466 bp, Homo sapiens
tagtcactttgatctcccccaaataaagaactgtaggtagtgattttcacatttaaatttgtgtaaggattacttgggatctctagatacctgggttggaccaacattatgatttttctgccatactaccagatgatgctgaggctgctggtcaccattctttaagtaggtgggttctgtgacatttggttgaagaatatttagcttattttctttttccttctgaattttcaggcctcccacttagtgtgtagtctgagatctttaagagaatgcatttttagtcttgggaagggatagtactccggttaaaccagtctgaactcactgtctaaggtcctaacaaatgatatgacctttaggatttttaaacatggggccttagtgttcttttgtaattaatgagatttttattttagatgcctgaggaagtgcaccatggagaggaggaggtggagacttttgcctttcaggcagaaattgcccaactcatgtccctcatcatcaataccttctattccaacaaggagattttccttcgggagttgatctctaatgcttctgatgtaggtgctctggtttccacatttggcatggtttttttttttgatactctagaaggaggggaaaggagtggtttggcctttgttggggactactattgaagggggtaaacttgcagctattccaaaaagatgggttttactctggccatcttgaacttggaagggactatgtccagaataagtgggctcatggaactaactggttctaaagcctcaagatagggggcaatcagatttgaggctgagagaggtaaaccaagattttctttgaagatacgggctttaagaaagcaaaagtggctgagcgtgttggctcacacctgtaatgccaaggcaggaggatcacttgagcctaggatttcgagggcagcctgggcaaccgcgagaccttgtctctgcaaaaaattaaatattagttgggcacggtggcatgtgcctgtagtcccagctacttgggaagctggggttgggaggatggctcgaacctgggaggtcaaggctgcagtgagctgtcatccttgccactgcactgtagcttgggcaacagagcaagagtctgtcttggaaagagcaaaagtaagttgctgtttgtatttccaggccttggacaagattcgctatgagagcctgacagacccttcgaagttggacagtggtaaagagctgaaaattgacatcatccccaaccctcaggaacgtaccctgactttggtagacacaggcattggcatgaccaaagctgatctcataaataatttgggaaccattgccaagtctggtactaaagcattcatggaggctcttcaggtattgcagttctgtaggcattcatacttatctgtgttctttggttttttgcttctttaaaacttgtgattgactttaaacttgttggcaggc

SEQ ID NO: 13800 - DNA, 1465 bp, Homo sapiens
taccccaataggctgcaaagttagaaaaactgaaattataagttacccaagaccaaacttcaagaatgtcaaagcaaaagttatgtctagagcagtgttgcagcccaaagatgctgctttatcaaaggtcacgcccagacctcagcagaccagtgcctcatcaccctcatcagtgaattcaagacaacaaacagtcttgagcagaacaccgagatctgacttgaatgcagacaaaaaagcagaaattctaattaacaagacacataagcagcagtttaataaactcattactagccaggctgtgcatgttacaactcattctaaaaatgcttcacacagggttccaagaacaacatctgccgtgaaatcgaatcaggaagatgttgacaaagccagttcttctaactcagcatgcgagaccgggtccgtttctgcgttgtttcagaagatcaaaggcatactccctgttaaaatggaaagtgcagaatgtttggaaatgacctatgttcccaacattgataggattagccctgaaaagaagggtgaaaaagaaaatgggacatctatggaaaaacaagagctgaaacaagagattatgaatgagacttttgaatatggttctctgtttttggtaagtaatatatatatattttttgcatgcttcagagaactgtggagaaaactgagatgtgttagcatttagttatctattagtcaataatattgcagaaccaggtgggcagatttacatttagttgttaattcattgtcttgtcagtactggggtgttaataggtttcaatacaacaaaactgcatatggaaaaaaaaatcctcaatttcagtattttgtatcaagtatcaccgttccttttaatagtgtgctgaaaaatgaagttactttaatattttagtataattagtagtttaagtgcctgatacaatcaggttatattttatttttctgaaaaagttgggttgtcaactttaaaatgtattggacagcatttaagaaagggcttgggagtgctggtaaacatgtcaacataaaaataactcctggactcttgcggaggaggcagctctgggaagtagagccctcttgtatgagcaagagtgttcttgatttttcctctgaccggccaataatgatttttggcaagtaatttttcgagacccaaagatgaaaggattggacctagtggatgtgtgaagcctcttgcagccttaatatattaattcctggtatataaaataaaatcttttacttatgtatagtgaaaaaccagtatgttttccatagcgcctgtctaaaatatttgggggggacctagagagtgctgtttaaagaataaagaattcacatgcagtgtaaaggtgattttcctttaaacatgcatgtgtttttgagaatagtgtgtagaaattggttttctgggttttaaaaacatttgacaggccactgt

SEQ ID NO: 13801 - DNA, 1465 bp, Homo sapiens
tgatgaagaaagccttccaaaaacaatgaaattgttttttaatttattttaacttttagagacgagatctcactatgttgcccaggctggtttcgaactcctgggctcaagagatcttcccaccctggcctcgaaaagtgctggcatcacaggcatgagccaccacacgtggccaagagcaaaagttttaaagcaggacactatggcctgatggacaggagagactagggtccctcctccctcccaggggcctggcttcatctcagaaaaaccgagtccctcttgctccacacccgcatccttagcttcagccctggcagttgtgttgagcagatgctaaggagatggggacattttaccccctccgcagccgccccagagggtctcaaacccagggctgatttagggttgccctgacatggccaaccctattctatgtccaagtgtcattcatggctaaagcaggccagggccccaaggcaaccaagctcctctctcctctgcccgctcccacacaccctcctctgccccagtgttcctatcattacgtcctgggcattgaaacccgggccattcttggaccagggctgtgggctgaatgagggcaggaagaacagggtcaatgggaaaggacagcccagaaaagagaattcaccaccacctgtggtctcccactgctttggtaggaaccttgtaaacacagcagcagcccccaggaaagtcttggaagaagggagaagctgatcagatttagagactgagacatctgggcctccaacccaaggctccccgggccctaaaaagccagactcccgtctccttagccctttccctcaccgaccagcaggtggcaccacaaacagggatttcaaaaccaaaactaaattaaagtggaaactcagatcttttgtttatgcaaatagttcattccctccaacattcctccgggaatggtcccccctccactccacagaaaaccctcccctccctgctgtgcatgacgcgggctccctctgcacacagtgcacgaagacgctgtcgggagagcccaggattcaacacgggccttgagaaatgtgagtaagggtgatgggcaaccaggtgggagggagaagccaggggagaagccagggcatgggaggcaattcagggagacaggaacacccttctctcttcacacacctcatcagttccactgtgcacacgcgtggacacacacaacacacgccccatccctcctcctagggatcagaggagacttcatacatagatgctcatgccatggtcctttcttccctctgggctcttggcagggagcagcgagaggaggggaccccttgcccaggacgggacactctgtgcctgtgtcccccactccacagatggtttctcccagacgctcttgctgaacctgtgggagccctttcagagacccacgggtggaaaccctcaccctccattaact

SEQ ID NO: 13802 - DNA, 1450 bp, Homo sapiens
cagggaaggactctcattggttcagtctccattctgttccaggtggagcataatgattggtccagcctgactcgtttgcccatctcttaaccatcaacatggtggggaggggacacgcaggagactgtcagctcctatcctaaacgggggagggggcaggggtgatcattttctgagctcctataaacaaagtttcagttctttttcctcctatggctggaacactggaataaggaaagaggtcgtctgtctggagaggctggttggggagtatggtctccccagcccagccaagctcaggtccctgcatacagcaggcgcctaattgatgcttatagcacgaatgactgaatgaataccccgttcccacaggctgtcctgggatggtcctaatttcacagaccctgagcggatcaagaatgaagcgggcccaggggtcccgcccaccggctgagtgcgtcttaggacgcagagacaagaccacggagggcggaacctctgagcgttaggtggcaccttggagaccccgccacctccaaaggcccagttaggggcggagcttctaaaccctagcattttggattgaaccatcgtccgtcggttaaaggggagagccgagaaagcccttctgcatttgtcgccagcctttttaccacctcctggccacagaaacgacgtatttgcttctctaacggcgacgccgtttcccccttcgcctcgttactcctcaaagccccacgcggccacagagttcagacttacccaccaccaccttgcagtggctcgccccagtttgacgcattgcagggaaggtcggaccaatgggcgccaagctctcatttccgccatgggccaggcccaatagtgacgcggctcacagagggacgcgtcacgcaccgccgagctgtgcccctccgccgaagaaagtgaagtgggcccgggaggcggggcgcgcggcgagggaaagtagtccggcgacgggagcgagcgcgcgcgcgcccggcggcaaacccaattcctgtgcagggtggggacgagagattcgcgggcccgtaggtgtggagcggggcgcggagggatccgtgggagccgcagtgcggcggcgcgcgggccgggtggggcggggccgagcgaggcggggcgcgcgcggcggccgttgagggaccgttggggcgggaggcggcggcggcggcggcgcgcgctgcgggcagtgagtgtggaggcgcggacgcgcggcggagctggaactgctgcagctgctgccgccgccggaggaaccttgatccccgtgctccggacaccccgggcctcgccatggtgagtgaggctggggggtcgccgaggctgcgggctctgaggcgggcttaacggggcaggacccctgagggggcgacagagcccagagtggggggcgtccgggcccggcgagagcctcgggacccttttctac

SEQ ID NO: 13803 - DNA, 1447 bp, Homo sapiens
gtcaaatgtttggctcacaggttgaagagcctcccatggcaccgtcgtttggtcctgagaagggaaaggcgcccagggggcgggctgctagagcacgaggcagctgtctcccagtcttcccaaacccgtagccgagggggcgtttctgcggcgcaggggcgggcacagccgacgcctccctgctccaccttctgtgtcggcgcctagactcggatagtgaatttcggaaagtttcactcgggttcgtgcacgtgggcacctccggacccggcctccttgccgcgcgctctgctaccctctccatccagcggcgcaggcggccctcgcctcacccctgggcgtagctctgggctccctttggcgtcgccagcttcgcctcctcccgccgcgtctcctcccgccgcgtcacccgtcggtcccggccgcgctcgcacgcggtgcgcagctcccgggctccaggcggcggcgcgtagcgggcgcccccgaggcggcgggcctgagaggcggggacggggcgtgccgccggcgcccggctcccggaagcggctgcttcacaggctccagccgagcggacaggcgtggcggccggagccccagcatccctgcttgaggtccaggagcggagcccgcggccaccgccgcctgatcagcgcgaccccggcccgcgcccgccccgcccggcaagatgctgcccgtgtaccaggaggtgaagcccaacccgctgcaggacgcgaacctctgctcacgcgtgttcttctggtgagtgtccccgcccgaaacaggtcaccctgcagccgctggcgccgcggacgcactctcccggggccgcgcccgatgctgcccaagccctctgcggctgggggcgaggggagcgctttcctacgccacgcggtccacgccggggctttctgctgcgggtggcgccgcccccacgccggccgcgtggtccctgcctgcgccccggggcgcggcgcagggggacgcggggacgcggggccagtggctttgctactggaggccctgcgggcccttagggctcgggggaggaggagcaggaggtggggaggcggggaacccaggctgccgaaagggggagtctcttgcccagcgggagaagcgactgcaccccttacacgcccacccttcgctggctcccgcctcctgctctgggactcgcagtctcctgaactcaaacgcaccttttcctttctttttaagtaagcagcttacgaacagtttcctttatctgatctcagccaaagcctaattagtgtcctggacctatgccatctcccagtagtgtccccaccccttccgatattccttacgagacagctcgatccaactccacgtcccgttgtacctctctgtgtcccggtgtctctgtatcttttgtctcagtgaccagggctctccttttgcctctttgtgggaatctcactgtgtg

SEQ ID NO: 13804 - DNA, 1446 bp, Homo sapiens
tgagtaggtgggattacaggcatgtgtcaccacgcccagcttattttgtatttttagtagagacggggtttctccatgttggtcaggctggtcttgaactcccgacctcaggtgatccgcctgcctctgcctcccaaagtgctgggaattacaggctaaggcagctgcttacagaggaataaccctatatcttaaaagtggtagttcgtgcatatttttatataaatttcacttgtacaaaatgtatacatatgtcttattttcaaaattttccttcaaaccaaaaaaatccattttcattcaaggctgccaccaagaaactttatattttaaattttatcaaaataagcaaagcactacatttgtcctcagagtagaactctcttattcatgttactcattttcaactacctctaacaaaaactttaatcagtgaatgatctgaatatgcatcagccagagtcacctcttctaaagcatattaacagtattgaataaaagtctgacatagttcagttaccttattagggttaatagccctccgactatcacctttaaacattaattacattaagtttgagaagacagacaattttgtcattcaactccaggtatatttctagtaacaatgtcagtaggaagaatccaccagaattcattgctatgcatgctattattttattctgttgtccgtgtgcttttaaagagtcagaatatttcttaagagaaaatattttaatttttttataatctgtaattataaatgtttatagaaaacaggaaactcctatacaaatattttaatttaacccgatcacaaagcattaccttgacattaacagattatatgtttctcttacaatttgtctaacaaagccttttggtttctgcagatcggattcctggcagctcgtacagacccagtgccttccttcctcttctaacagcattggctgctcccctttccagttccatgaagccaccatctacaactctgtcaacagctcaagctggaaaagaatcaccatccagctgcctgaccatgtctcctctaggtaggttgcaaattaaggtaaactttgtgaaattatctggcctctctacagagttcatgcagtgagctgaaaacaactgacagtgtgaggcagagctttacatgcagccctggtgccctctcccatcttccctccttttctccctcctctcaccaacccatgcccccaaatggcaactgcatgttccaggaggaaattggagtgtgtctgtaaatgattcagagatctcagatttcctttgacttaataccatagcatgtaccaaactcaatcacaggccctgaatgacagaccccaatccaagactggtgttggcaccagttctgccccagtgttctgccttcccaaaggctgcgcttctcatccagatacaaataccagctgggtgtgc

SEQ ID NO: 13805 - DNA, 1441 bp, Homo sapiens
gctcctgagtagctgggattacaggtgcatgccaccacatccgactaatttttgtattttaagtagaaacaagggttcatcatgttggtcaggctggtctcgaactcctgaccttgtgatccacctacctcggcctcccaaagtgctgagattacaggtgtgagccaccgcacccgaccctgattccttttcttactcctttctcccctcctcagctgcagccatctggttttcttgttttttctccaacactccctgacaagctcttgccgcagggcctttgcactagctgtttgttccttctgctgggagagctttttccccagatatctgctttgactcactcactcacctcctttaagttcccactcaaatctcaccatctcaatgaagccaactctgacaactctaggaatctagcaagccctccctcccctctttctccgtctttctctgctttattttttcctttttccacagcacctatcatctccagaaatacatatatttgcttgcttattgcattcactgtttgtctccccctgcgagaggtcaagatctttgttttgttctctgatgtctaccaaatgcctagaataatgcttgcatttggtaggcactcaataaacactttcttatatgtgtaatccacgagataaatataatttttatcacttttacagcatctgaaggacgtagtctggggcctggccccagaagctgaggtacaaagaaggtaacaaacttaatcagatcacccagccaataagtagtggagctgagagttgaactaagaatccttgcacttagccgctacttcaaattgctttcttgaaacttacaaaatgggagcctcatgtaggctgcttcctggattccagtgactcacatgatctaattattctctttgctctgagaaggctgcactcctactcagactggggctaggtttcacatttctttgtctcctaagatatgtaaacatggtatttcattttacaacaaagacctttgaactggattggatctttcattctgtcacgttcttggggccccacaactccatggacagaaagtgagcaccacgaagacaggtcttgttggatattctctttgtccctttctgattccccagtgcccagagcaaggtgggtgctccacaagtatgtgttaaatgtcgtatgaatgacattggagatggtatccagttaaattttagccttgtggccttgtttgacttgaggtcatggttcatcatgcctcaagtcaggcaatgaaaatgagaaggaaccagtagagtatggaacagattgggaaatcttcccgttttcatcgtctgaaagtgctggagtgcctgcagggcacggtgatcatccataggcttatggctccttgggtaactgcccccagcgccacgtgacctgggtggagttatcaatca

SEQ ID NO: 13806 - DNA, 1435 bp, Homo sapiens
gctcttctggagaacggcgcggtcaggctctgccgcagctttcaggtcccctcggccccgtccgggtgcagcgcaaccaggctgcccgcggagccccaccgcccccatgccgccgcccgccatggttcagcccggccccgcccctcccgccggccgtggttcagcgcgtccaccccgccgccccacagcgcccgccgcgccgcgccccgccccccgccgcgccccgccccccgccgcgccccgccccccgccgcgccccgccccccgccgcgccccgccccccgccgcgccccgccccccgccgcgccccgccccccgccgcgccccgccccccgccgcgccccgccccccgccgcgccccgccccccgccgcgccccgccccccgccgcgccccgccccccgccgcgccccgccccccgcgccgcgccccgccccccgccgcgcccctcccgcgcccgccgccccgcccctcccgcgcccgccgccgtcgtagcgcctaggcggggcctctcgtagcgacgcccccaggggggcagaacgcgtgcgcacgcgcgtgcgaacgcgcgtgcgcgggcggtgtttgaggccggccagtcgtgactgggcggcaatgaggtcagtgactgccgggagtcctgcaggggcggggcggcgccaagcgcagggagcccggctgagtggcagcccaggtgagcgctcagggagcccgggtgagggccgggaacccaggtgaggggcagcccaggtgagcgcgcggggtgcccgggttaggggccgggaacccaggtgaggggcagcccaggtgagcgcgcgtggagcccaggcgagggggctgggaagcccgggtgaggggaccggggatcccaggtgaggggccgggaactcagctgagggggaacccagatgggcgcgcgggagcccacgtgagggggagcccgggtgaggggccggggtggctcctggcgtccgcggtcccagccctgccttccggtgggcgtgcggcaccccgggccgtgcggttcccggacagcagcttgtgggggactttcgagccccgcagcccggggtcctgcctgcgcgggttgggcgtggggggctcctcaccgcgacgctgactttggagtccttgagcggcgcggatgccggacggagggaggggacaggcggaggcggaggcggcgccgtcgcccctgacctcgcttccctcagaccggctgggcaagtacggtcagctcacctgtgtgcccacgaggcggggaggcggctcctgcagagccacagaggtgccgtcggagctgctgtcaaggacagcaggtgtcacgtgggtgtggcctccactggtcaccgagttagctggggcggaaggggacaaggtgcagctcaacatggtgtgggaggcggagggacgctgggtcagtcagaacctgtaggagc

SEQ ID NO: 13807 - DNA, 1414 bp, Homo sapiens
actaggagaaggagggaggctttcccttccccccagtgccccatgtaccaacgcgtctcgccataccccttgcccctcttccagcagctgacggagtaattcgagtaggaatcgaaagatttggaggcgccgggggagaaacctgcggagcgctctccgagcctgtggcgtcccaggaagactccgagcggggccagggaagttctctggaggacatggggtggatacccaggtctccttccctgggtgaaataagaactgaaaatctaaaaataaaataaataaaataaaatagaaaacacagagaagcaacaaaaaagcgcttcccctcctcagttctccccagtccacccaaggtttaccaagactgttgtagttgcaagagtgggcttccggctccacgtaacgatgcgattgggctgtacctctgtctgtctcctgcgcgatgtcccgccccgggaggtgtcacggaactcagctgatataagcccgggatcccgccgggtcaggttctctgctctggacttgggaggctccgttgcctgctcccggagggagacgcgctgccgaggagaacccagcgggtaatgaatcccccgcgcttctttgcccaggccttccccaaacctccccccggtctgcgcgggttctcctattgggctgtggtgaagacaaggtgcggcgactgcagctccccaggtctgggcgctgccgggagagagtctttcccgctggggagatttagtttgttgactcaggagcacctccaacgacagctagtggcagaggacccgggagctgggaggttcggaacgcggggcgagctggggaggagggagaggcgccgacccagcgcagcctacatcttagcaaaccaaacctggcaacatttccccacggttcaggagcacgaaggacttaagggaaaacgacgaaatcggggctcccgaggatgaagttaaatgggttgtggcctggggacaaatagggccaatgtccagtctattacaagaggctttgttccagaggcttgcctataagcccctggcttggaacgtcagtcttcaaactgtaacaacaggggcaggctactagggtagcccacaaagccctgtatcccccatacagtgactaactagagccctagttggtcatatccgcagtggctgagactgcggtgtgattccgtttccctcttgcatgtgtcccgggagcccgagttgtcgaagcccaaattcaggctcaggaacctgatgtgctgttgatgccaaacactgacacacagatgcttggagacagaggaagatttattccatttggccaaagcgagaaggcaagaggtcaagatctctcaaatccaccctaacaaaaagaagtagtggggagtttttatgagaccaggaagtaagggagg

SEQ ID NO: 13808 - DNA, 1412 bp, Homo sapiens
aaaattctggtgcagattccaaaggtgttctctgaggaaaagttcttttgtttggagatgccatgtgttacagcacagaaattgatcaacctggcttagagcgtcacattcttcctctgttggagcaagaggtacagaaggaattggaatttagtggaattgaagatctttttgaacagcatctgcagaatgtagttcattctcacctggctgggtagggaaggttggaaggggatggtcaataatcattcctggtcactgtgagtctggcatcaccttgtagaccacatgggtgtctcttcctgtccacatcactgtaaccccagtgtgggcacttctgctggcgagaaggcccaggttctctacacaccactgagtcagttccatctccccagcggggcaccttgaccaaagccatcagctgaaccaccttcttcctgtccctaggaaaaaaccctgatccatgggctaagaatctgaatgaaaaagactatgagttgctgtgccttgatggtaccaggaaacctgtggaggagtatgcgaactgccacctggccagagccccgaatcacgctgtggtcacacggaaagataaggaagcttgcgtccacaagatattacgtcaacagcaggtatggaccagccaggtcctcccaccttttcttcctagatggccataggctattcggggggagtttacaacaaagtgcagccatgactccagcactttctttttgaaaactagaattccatgcattgtgcatttcatgccatgcattgtggactagagtatcagggttcaaatcacagctccacagcttcctagttgtgccatcttgggtatgttacataacctctctatgcctcagcttcctcatatataaaattgtaataataatatttttacctacttctcagttaacatgagtattaagtgaagacatgcacccaaacggcataggaaaattccatttcctataggacgtgctcaaaatatgttagctgtgtaattatggaactagacctctcaggcccagctctgcttctagctcctggtcactggtgattagatctgatccatgtactcttgggactaggaatctgcctttctgctccccctaaccttgttcaggggtaccctcatttcccctactcctgtccttcccgaaaatgaagaagacagctcctgtttcccagcgcttgttgatacgagtcatgaagagtggatttctgttcctcttgcctaggcagactgagcactgttctcaacagtctgaaaaacacaggacccttgccctcggagagcctgccctctgggggaacaaccactcagggccagccttgttgaagacaggggctgcctgagtattctaatcctaaaggcccctccacacacacacatcaccttcctt

SEQ ID NO: 13809 - DNA, 1403 bp, Homo sapiens
actgggggtagggtatgttcagtgatcagcatccaggtcattctgggctctcctgttttctccccgtctcattacacattaactcaaaaacggacaagatcatttacacttgccctcttacccgaccctcattcccctaacccccatagccctcaaccctgtccctgatttcaattcctttctcctttcttctgctccccaatatctctctgccaagttgcagtaaagtgggataaggttgagagatgagatctacccataatggaataaagacaccatgagctttccatggtatgatgggttgatggtattccatgggttgatatgtcagagctttccagagaaataacttggaatcctgcttcctgttgcactcaagtccaaggacctcagatctcaaaagaatgaacctcaaatatacctgaagtgtacccccttagcctccactaagagctgtaccccctgcctctcaccccatcaccatgagtcttccatgtgcttgtcctctcctcccccatttctccaacttgtttatcctcacataatccctgccccactgggcccatccatagtccctgtcacctgacagggggtgggtaaacagacaggtatatagccccttcctctccagccagggcaggcacagacaccaaggacagagacgctggctaggtaagataaggaggcaagatgtgtgagcagcatccaaagaggcctgggcttcagttgtggagagggagagagccaggttggaatgggcagcaggtagggagatccctggggaggagctgaagcccatttggcttcagtgtcccccaaacccccaccaccctcttcctaggccgccctccccactgttaccaacatgaagctgctcgcagcaactgtgctactcctcaccatctgcagccttgaaggtgggtgtgatatggagagggggccaaaagggagaatgtgctggtggttatagctacctatctgcctgtgctcttatatccaggtctggcaaccaaagggctcaaaaggaagatcattccctctctaaagcccagaaagcccatccaaagatctggctggatacctttttggggagggggcagagagctggggtgggtactggcagaggtatggcaggaggccaggattcactgctgtggacccagctgaaaagagtgtgtgtgtgtgtgtgtgtgtgtgtgtgtgtgtgtgtgggcaggagctttggttcggagacaggcaaaggagccatgtgtggagagcctggtttctcagtacttccagaccgtgactgactatggcaaggacctgatggagaaggtcaagagcccagagcttcaggccgaggccaagtaagtctcagggcaaggggttcaggggctgtggaactgtggagagaaagaagg

SEQ ID NO: 13810 - DNA, 1402 bp, Homo sapiens
ctcccgagtagctgggactatctgccaccgcgcccggctaaattttttttgtattattagtagagacggggtttcaccgtgttagccaggatggtctcgatctcctgacctcgtgatccacccgccttggcctcccaaagtgctgagattacaggcgtgagccaccgcgcccggccgaccaggaattatcttaaacagaaaaagaatactctaaggaggggtataccggccagcagaacagtaacccctccccggggttttcacaaggacacaagctggtgtgtaatagacttatctataaagcagactcaactcctaactggaattgttcctgattggttagcagaaacagaattgaggactgacgacagctgcacaagaagatgaaaccatttccttcctcttttctaagcttgtctcttaaaacccactggacgttggcacagtgctgggatgactatggagacccaaatgtctcagaatgtatgtcccagaaacctgtggctgcttcaaccattgacagttttgctgctgctgggtgagtgagggtcattctgaaatggggcaatttcagacactcctactgcctggactccaggtaccagtgtggtaaggagcaggcctgggccctggaagcaggggatagattgaaagaggagagaggaccctgaattcttaagtgttccaatggttcctaaggtcagaactcagaggtagtttcatagtccctggaaagtccattctgcaccaaacattcatgtgtactttgtagtcatgaggaggaacaggaaatgagataaaggggacatatgaagtgaatacttttataaaagatcaactggaaacaggatcttgagatgggtcctggagaaggaagagcccaagctcacctccccagcatttcacatacgcagctaaatttgaagccgtgttctcctgctcgacgttgatccactctcttctcttttacagcttctgcagacagtcaagctggtgagtatgccctttgcttccttgtattgacagtgttgtatcctcataatatgatgctgtgtttgctggggcggcgggggggtatgtctattccactgaaaatcaagcttgggttcagcatgggcagttcccccattttagtggggtctgggatttgcttcttagatccactgaagacccaagggaatgaggccgctgcaagtacagatcttgaactacatctacaataggactcttgggtgcctgacctcccttgggagctcctttggcatccacagtcccttcagggttatttattccacacccctttccactctgcccctcagcagctcccccaaaggctgtgctgaaacttgagcccccgtggatcaacgtgctccaggaggactctgtgactctgacatgccag

SEQ ID NO: 13811 - DNA, 1396 bp, Homo sapiens
agagctctttgtgtgatgggaagatgggataacaggctgttgttactgtactggtttttttttttaatatatttaaaaaaaagagtgtctcctaaagtgtaagcgctatcatgctggactaatgttttaatttaatttaattgttgtcttggtagagatggggtctcgctattttgctcacgcagatctcaaactcctgacgcccaggtacactcccatctcggcctcctaaaatggtgggatcacagacgtcagccaccgagcccggtcacttttttgtattccccacagtattgatgtatatcttctgcgttcaaaagcaattttttaaagcctcataacgtggtaacagaatactttgcacattacaaaattcagaacacggaaacaagaagctcgcttttttttcccccctatttcggtttggccctttagatttcccctcccccaccggggcgggacttcccgccgacttctttcaggttctcagttcggtccgccaactgtcgtataaaggcgctgcctcaggccagaggcctcacaaagcgttgggtgagactcctcttgctcgtcatgtctggccgcggcaaaggcgggaagggtcttggcaaaggcggcgctaagcgccaccgtaaagtactgcgcgacaatatccagggcatcaccaagccggccatccggcgccttgctcgccgcggcggcgtgaagcgcatctccggcctcatctacgaggagactcgcggggtgctgaaggtgttcctggagaacgtgatccgggacgccgtgacctatacagagcacgccaagcgcaagacggtcaccgccatggatgtggtctacgcgctcaagcgccagggccgcaccctctacggtttcggtggttgagcgtccctttctatcaataaaaggcccttttcagggccaccctactttctcagctgaagagtggtaacactgaggagtggttttggtaggtacggaattttgcttggttctgagtcagttctggggggaacagttttttgaacacagcggcacacgtgtggccattcacccggggtcactgtaggcaggactaattacgagatgtaatgtctaaacttgctcaaaattcgtaagcttgtttacgtaatggagaaaatactcgtacacagaatgtgcagtaccagaaacgtttatgtaacccccgtagtgagcttgacagtggtaatcggaaatcgtttttgaaaagcctccaaatccacaagtatttgtgggttttttttgtttcgtctttgtctgcgagttggagtgcagcggcgcgatctcggctcactgcaacttccgcctcctgggttcaagcgattctcctgcctcagcctgccgagtagctgggattacagttttgcgccactac

SEQ ID NO: 13812 - DNA, 1394 bp, Homo sapiens
cagcctagcttctggtcactgttctttaatcctctgtatctggaaaatactccagttgtagatctatggaaggacatacgaaggtgatgggtggacccggagggccgccctgactgttatggcttactagggtaacagtgccgatgatggttagcactcagccagggctgctgcatctccgtcccgttctttgatcacaaaacatgcagtgtgaaatcacacggggtgttgtacgccggggttgctaccacctacttgagcattcagcgcttaggaccacgggaaaccaaaccaggagggttttcctgggcaccctccacccgacaccagccctaggggctgccctgactctaatgacctgcccctctcctggaactccccttccatcctgcaccgccccagggagtgcttgactgccttgcagctcatcaaaccctgctttaacagggtgggggaggggggctcaggagtcctttgcttttttctctttgccacttgccaaattctgaaatcaagttgagcaagcccacccacttcaggcctcactgagtcccgtctttcattcctgggttagagaaacactgcccgcaaggacagatctgtggaaacactaggtccctgtgactcaggtgccggaggatgcagtgtcagcagatgctgacgagatcagtcctgcaggagcatctttacgacagaacatgttattttccataagtggcctgtttaatgatcaaatcagtcaaatagctgtgctggtaggacttggggttaaaaatgaggcctaattgcagcttttttctccagcaccaattcatgagaatgcctgctcgctgaccccaggtgactgggcctcccacaaatgggtgttttgggtcacaaagggggcagggtcaaatccctcaggcaaagagtgactgaggtgtatgactcactgaccaggccgggactgcacggcattcgttcactaaagaagcctgctgtgtgccaggcatcatgctcagatgctgcccgagacacagcccctacccgaagagctcaaggacctttatggaaaatcattttgatacacacagggcttgggaccatctatgtgttcaactctttaaaaaatggttcccagccccagttctcttagcaaggctttctaattcattatctcatttaatctcgccatgagtcaggcagggcagtaacacatgggaaaggagggtgggggtggggatagtgtgacctgtccaccaggtcctgctacaaattgacagcagatcccaggcctcgtgttagcccaagctgcttctactgtcacattgcagccttctgcaaggatggggtggtactgtccttctcacttctcattctcttccattttaaaatgataaacctgggtcagagga

SEQ ID NO: 13813 - DNA, 1343 bp, Homo sapiens
cagtggtttctaatgggaaggtgaagatgccgctgcagtgtcagtggcatgaggctgcaggagtcaaccagggcaggaagcctggggcctcccctccctggcacccggcatagccatgcccaggcccaagatggccctgactccagggacagacttcaggcaacaggtggttttccacccaggccaccatgcctgaaacttggttcttttgcaaagccatagttctcctccccctctcaaagaaatggcgcctgggagggaaacttcgtgctcaaactctctaggagccatttctcagcccacctttcctattttctgaagtctcccttgccagcatcccattcacctccggaaagaaccaggggcgctctcttcagagtccagagagctctgggaggcatgtgggcagcgtcagagtggcctcgcctgggcggccagaggagcccccagtctccctcaagtgggcctcaggaactcggggggcccaggggaagcctggaaaaccgaacttcgccatcagccttccttacagcgctggctaaaagagagggggggaagggccccccagcggtcttccccgcccccctcccgcctcagcccctctgccatccgcctgcaccgcccaagaaagcacccagaacgcggctgagctcgccagctcctcgcaggcagggagagagcatcctggggggcagcttccccctccagcccgcgtctgacatccccactcccacacaaggatgccgccgccgtgccctgtccgcagtcgctgaatgtcactgctccctcttcctcccgatcagggtagacacagctcccgaggcgtcccccaccccaaaactgccgcgatcgcccgaaggcgcaaagcctgggcgaaggacgaagtttggggcccacagcgacgggagtggggacgcgttggcgaggaccgcacctcagtcccagccctggcgggcacactccccgccccaaacggcccaggcgtccccatcctcccgcggacaccagcgtctccgccctcccccgagggcggcgagaggagccccccggggcggaggcaggtacccccggggcggagactggggcgggcggggtccgggctgcgcccccggccaggccgggcgggctggcgggcggcgcggggggagcggggctgggcggcgctgcctcgggctctgtgcgctgcagcccggagccgaggaggaggaggcggaggaggagaaggaggcggcggcggtgggtcccgggcggggggagcgcggcgctgcggacccgggcggctggcaaaggacgaggcggaggctgaggaaggcagcggggagacccaggctgcagcaacaaag

SEQ ID NO: 13814 - DNA, 1274 bp, Homo sapiens
gtcctgtaatccccctaggtgtctgagcgaccgccggctctgcctgaaccgctcaggttcgcaccttctggcatcttctcgcactttctccagccttcccgggcagggggatcctggcctgacgctccccgctccctgcccccgccctgggtctctggggtcagcagagccacccagtgcactgcgtttaggcatgcccacatggagagaggcgaccacagcggtgatcataagcccatggtgggcagaggccctatggagccaagggctccggccgccacccccgctccgccaccagcagcgctgccaggactcgctcttcctcctcctcctcacacgccggctcggatgatctcctgccatgactcagcgcttctcgcaggctgccctgctggggacaccggcttcgctcgggcccctcccgacgcgtccaccccctctcgccacccacgcccgcccccagccgctgggcctttcccagtgcggccgccgccgccacagctgcagtcagcaccgtcaccccagcagcatccgccgcctgcaccgcgcgtgcggcccgccccggcctgaccccgccgccgaacccggcgccagccatggagcccgaagccccccgtcgccgccacacccatcagcgcggctacctgctgacacggaaccctcacctcaacaaggtaaacccgcaggcccacctggccgcccatcggcccctctctatcagggtcagggccctcttgcaggtccccgcaccatggcctcgcccctccgccgctcccctgggaaggttcccggtgagcggccgcggcctggggggccttggtgtgggcagaaggaagaaggacgcctaatcgggtccgtatccactagagtgatggcagggcagtgctggtgcctctgcacctcggcatcccatgttagggatagaggtaaaggtaaaggttagtgatagaggaaaaggtgatacttttcggcagctcttctccaaaaacaagagcccagacaatgaaagtagtatcagacaaagtgtgtgaatggagtgccaggtcagactccatgtgccactcacttactggttgcacacacagtgtggcaattattggaagttgataaggcgagaagtggctcaactggtcctgcccagacagaaacgtgtactgagtgccttcagatcacgttagcaatctggaaatccaagtcctctcggtttctggagtgacacggttaagagtctgggaatgcgtggtgggtggcctctgtcttggacactttgcatg

SEQ ID NO: 13815 - DNA, 1200 bp, Homo sapiens
atcaaggtcaacagcaacagtcataaatcatgtagatagtataaacccttgatttgatgtgacaaagtggtatcttacctctgtggtcttctagaatccattacccctagtctaatcataagaaaaacaacagacgaatctcaatacagggggggtaccctcttacctctttcaaaattaataatcagtagtcctcaaaactatcaaataatcaagactaacaaaagtctgaaaaactctcacagccaagtggagcctagggtgacaggacaactaaatataatgtggtaccctggatgggatcctggagtggaaaaaggaattaggtaagaactaagaaaatctgaataatcatgatctttaggtaataatagcatgtcaatattgcttcaataattataaaaaatttcattataaacgtaagatgtcaataatacgcgaaactggctggagggttgatgggaaccctatagtatcctcaattgttctttagatctcaaactgttctgtttcacttttttgcccaggctggagtgaagtggcagtgatctcggctcaccgcaacctccgccgcgccactccatcccaccagggttcaagcgattctcctgcctcagcctcccaagtagctgcaattacaggcacccgccaccacgcctggctaatttctgtatgtttaatagagatgggttttcgccatgttggccagtctacttttgaactctgatctcgggtgatccacccgccttggcctcgtaaagtgctgggattacaggcgtgagccaccgtgcctggcctaaaacaatttttttaatgaataagtagttatttaaaataagaatgacaatggcctgatggcattacacatttttgcataggctcacgaagcccaggctatagtgttttttcttattctttacatgttgggaagggaggctttttcaactctgcctaatgattttaccttaactgaatttttcctgaaattatctgcagtgaaaagctcctgtgtgtgtgggtggggtccggttggccgcgccccgcccccaccgccgtgcgctcgctccctccctccctcccacgctccctgccgccagccccaccgcccctcgcgtccgggacgccggtcccatcctcgcgaagccccggcctcggggaatctccacgctctggccgggcgcggtggttcacgcctgtaat

SEQ ID NO: 13816 - DNA, 1200 bp, Homo sapiens
gtttactccacagagtggcaagctgcctttccaaccctcacttagccacatgcggctaccgtattggatggcagtcttagggaatttcaatatcaactgattctttaattctgaatttgagaatttctttttataatacacacggtcgctaaggcgcttagagatctgtgaggcgcatggagattattttactctccggtcccttttgatccaagatcccacagcattaaaagcagtaagagggaaggcaatgggcatcccttgcgcccaggaacgtggcctggagggcctggctgctccgagcagtagcagtgcccggcggggaggctgcagacgcggcgttggaagttggatttctagacaagctccggcagctgcccggaacccgtgtctttttctggggcacccaggaacagcagggccagacggagagagagcagcctccagccaggcacagggtcccgagctgccaccgacaccgagggagcccggcccagggctgcagcgctttccgcctaggtgggcggcagcgggagcgaggagccggaggaagcccggcctgcgtcctgcgggcagcaggacacgatctccccggcgcgctctcgccggcgccgcagcgggcgcgcgggcgacagggtgggcgtggaccgatgggggcaccgcccctgggagaggcgggcgccgcggttccgggggcgggacgcgccgaggagtggggcgcgagccgccggttttgattagtgcgcggagctgcggcggtggagctgctcggccgggagcccggcggcgagacggagaggcggcggaggtgcccgcgcgcagggtctggtgggcggccgcgaggctcgggagaggcgaaccggagcgcgggaccgcggtcgccccgaccagagccgggagaccgcagcacccgcagccgcccgcgagcgcgccgaagacagcgcgcaggcgagagcgcgcgggcgggggcgcgcaggccctgcccgccccttccgtccccacccccctccgccctttcctctccccaccttcctctcgcctcccgcgcccccgcaccgggcgcccaccctgtcctcctcctgcgggagcgttgtccgtgttggcggccgcagcgggccgggccggtccggcgggccgggggatggcgctgctggacctggccttggagggaatggccgtcttcgggttcgtcctcttctt

SEQ ID NO: 13817 - DNA, 1200 bp, Homo sapiens
gcttcaccagacacaagggcccagccccagctgtgtgtgtgctgggcccagccccgagggcccccttcctcccctgctgcccttcccaggctttcgggcagagccctcttgttcaccgcctccaggagggcggggcgtcctagtgggcccagcctcatctctgccctcgcgctccaggcctgctttcctcctgctgggtggggattgtgccctggcccatgtgggttgggaatggtggccccagggagggctcctggcacccgggggctgtgtccggggcaggtttccctgcctggcagctgagccctgtcgtgtctttgacccagactcggagccgtgggtcccgactgaacatcatcatcatcgctgagggtgccattgaccgcaacgggaagcccatctcgtccagctacgtgaaggacgtgcgtgtgggcctgggggtggccactgggcacctgctcctctaggccgtgtgggctggggctcagggctggtccttcccactgtcctgcagctggtggttcagaggctgggcttcgacacccgtgtaactgtgctgggccacgtgcagcggggagggacgccctctgccttcgaccggatcctggtaagtggccatcaccctgccctgcgtacgtgcgtgggtaagcgtggtgtgtgggtgtgggtgtgggcagtgtgcacgcgagcatggcacgtgcactgtgtccatgtggctgtgggtgagtgtccgtgtctgtgtgtgggggtgtatgtgtgggggacgcgtggtccttgtgggtgtgtctgtgtgtgtctggtccgtgtgggtgtgtgtggcagtgtgtgtgggtgtgtgtcagtgtgggtgtgtgtgggtgttccctcaagctgttgctcctcctgggggagactgaggcctggcttctccgttcccctgcaggtatagggaactcagacctggggaccatgggaggccccccaccagcctgtgcctcctggctgttctgacccccaccctctgccagcccaacgtggcagcagtcagggccaggggcaggccctgggagaggggctgggtgggcagagggtggtgcccatggcgcctgtggcgtcacagtctgggaggctggtgctgggagggagcattcggggtctggcctggcctcgccgtccttggtcctgatcaccgctgggtctcactttgtcctctgcaaaatg

SEQ ID NO: 13818 - DNA, 1199 bp, Homo sapiens
agggatttcgatgggaaactatcaggtatccatcttacattcctgacctggctccttctgacatatttttgttttctaatcgtgaaaaatctgtaaatggcacccatttttcttcagttaataacgtaaaaaagcctgcattttcatgattaaattcccagaaccctcaattctttacagatggactaaagagccggtatcatcacttaccaaactgtctttaacttgatggagcttacgttgaaaaacaaagtttatatttttaaattttatcttttaattccatttcccatgaacttttattcttttaaaaacaaacccaagtattttaattctacttgccttttttacttattacacacttcgggagattttttgccatatggaatcacctcatcccttgtcacgattgcataatattccatagtaggaatgtttcatgatttatttcttcattcccccactgatttcaattttctgcaactgcaagcattgttcataattctgtactgtttgtgagcctatataggagtatccgtgcacaaacctttttatgcattgtgcgagggttactctgagatagacaccaagggaactgctgggtcataaatccaattttttcaaagtaaatccgcttgcgaacccggaaccaagtcgatttttcccgccccgccagttccctgttcaggagagtgcagccgtgattggcgcgttcactcaggccaggggcgccccaggtctcaggtgctaggagcgcggtgacctaccaccctccgggcacgcgttctggccacgcctcgcggcccctttcattgaaagagcccgtagggatcacgtgaaagaacactgcagagtgcgtgacgtcacgacgctcacaccaatgggagcctctgtttatgtcgggagccatcaaatagtcatcttccccctaccatcccccgcccactctccgtcgcgctgcgctgcgtcgctttcagcctctggtgaagggcggcgcgcttaggcaggcggtggcgcggctggagtgccgcggggagggctgtgccggttgctttctgcagccgcatctcggccagctctcctcgccgtccccggggcgctgtgcgtctccagtccgggaccgaagccgcctgccgtagcgggcggccagatccgcgtcccgcctcagcggccggaggacatgcgggagagagaatgag

SEQ ID NO: 13819 - DNA, 1194 bp, Homo sapiens
gtcttgctactccaagtgtggctgaagagccagtggcaccagcatcacctggaagcttctttagaaatgcagactcggccaggcgtggtggctcacacctgtaatcccagcacttcgcaaggccgagacaagcagattgcctgaggtcacgagttcaagaccagcctgaccgacatggggaaacctcgtctctactaaaaatacaaaaattagctgggcgtggtggtaggcacctgtaatccgagctactcaggaggctgaggcaggagaatcgcttgaacctgggaggcggaggttgcagtgagccgagatggggacttggcactccatccagcctgggcaacaagagcgaaactctgtctcaaaaaagaaaaataaaaactcttaggcccctgttccaacctacgtcagagctgcagtttaatgagatccccaggtgacttctatgcatgtggagctctgagaagccctgctccagaccagcatggtggttgaatattggaatcacctaaggagctttttaaaccactgatcccaccaccacggtttctattttcaaggtctggctccctaaatgattccaaatgtacagccaaggtggcaaagcactcgaaggcctcctattccccacgagaacctctgaaacagcagcaggtctgggtgctgctgatgcagaatgagtaccaagatctccctgaagcccaataaagccactgaccactcctgtaagtcaggagcagtgaactgaagccagctgttcggatctgggtgctataggtacccccgtgcacgttctcatcatgattgttcattgtgcatttcattaggtggaatccgtttaggaatctgtcatgggagatcaaaaaaacattaagcttggaataatccatgtctgcttgtttagcccatcagacaaatcatttgcaattaggtaggatcctcatgctgaagaagatagagaaagaaagcttgcacagaaaagttagaggcctcaagttgggaaagcaaacaaaccaaaagcagagaggagtcacccaaaggaagcagcacccagtgaacccctgccgtgagtcagcacgagggaggcccagccctttctaggggagcctgattaaagatcaggctcagctgctgctgctgctgctgctgcttgtcccaagaccaagtcgtaatagcaacttcccttcctcagct

SEQ ID NO: 13820 - DNA, 1191 bp, Homo sapiens
atcagtcttaagtctcagcggggcctttttctaaacagacggtaaatgcaaaacctcccccagagcagctctgaaggcagcgcgtttctcttcctccgtggtgggaggaggctgggctttgagggcgggaagccctggtcgaggctggacccgcagcctggccctccccaggcgatggcagccccggctgacccacagcgctctgaagacaggtcctcggacacccgcccaggggcgcgttttcacctgcggagcaggggtgcggggaacagctgggaggtggggggggtcccaaccgcagctgagctggaagtgcagaatttcaactggcagcgagactgggcttcccagagccaggatgagccaggatgtgtggggttaccctgcccccattttccctccgcgtggagtggggcgagtgagcggctcacgcttggctctgaagctccctgggcacggggggctgtgactgggccaggcaggggcggctcttctggcggcagtgacagagctcacgctgcatcgctgtgccccggggaagacttcacagctatggatatttagggtccagttcagtgtgtcacacaccagaaactttaaatttttttctcaaatgttctactttagttggcaaagtataattcttaaaagtcatggcggagtattgggtgcaatcctcctggaggcaggaacgggcttagcaccggcaggttctggttggccctttgctgctgtgtgcgtgggtcccttcgtctctcctctctccctccaaggtgggatgtggtaccctgggagcacctgtgctgagtctctccttggtgtccaaggggctgggatggcccagggtgcacaggtgtccccgggcagcctgcagatgcttctcgacgacacggcccctttgagttcgaaggtcagatctggaagccacgttgccacacaacagcgacttcgcagcactgtcgccatgtgtcccgctctcttgccagggtccaggcagctgggaaacagcttggtttgctgagaagccacgtcctgggtgtccctgtcccagagccctcctcgctcccagcctgcaactggggcctggtcgggcgccctggcatgtttcctcctgctgcaggcgtgctcaggaagtgctgtgtgtgcatggcgcccgcgggcatggcctgtgtgctgggtgctgttttactt

SEQ ID NO: 13821 - DNA, 1190 bp, Homo sapiens
aatctcagctcaccacaatctccacctcccaggttcaagcaaaattctcctgcctcagcctcccgagtagctgggattacaggcatgcgccaccatgcccggctaattttgtatttttagaagagacggggtttctccatgttggtcaggctggtctcaaactcccaacctcaggtgatctgcctgccttggcctcccaaggtgctggaattacagacatgagccaccgtgcccagcctaaaaaaaatttttttaaaaaatagctgagtgtggtggcacatgcctatagtcccagctacccaggaggctgaggtgggaggattgcttgagcccagcagatcaaggctgtagtgagccaagattgtgccactgcactccagcctgggcaactgagcgagaccctgtctcaaaaaaaaaagaaaaaggaaaaagaaaaagaaaaaaaaaggactaccaggtgttttttttttttttttttttttgagacggagtctcgctctgtcgcccaggctggagtgcagtggcgcaatctcggctcactgcaagctccgcctcccgagttctcgcctttctcccacctcagcctcccgagtagctgagactacaggcacccaccaccatgcctggctaatttttttgtatttttagtagagagggggtttcaccgtgttagccaggatggtcttgatctcctgacctcgtgatccgcctgacctcggccttccaaagtgctgggattacaggcacgagccaccgcgcccagcctggtgtccttatttcttgggaaaggatacagagggtcagagaggcgccccagcttgtgcaggaatgcattcctgagatctggcctggccgtggtcactggagtgtttactctgcttacagggtctggtgtagtgggggatggctgggtaggaacgtgcgggctataaagccagaccccaggtgtcagtgcggttcagaaagcaactagcacagccatgcccaggccaggacccgtgacacagcgatgctctcagatgctgctgatgttacagatgttgttgggggcaccctgagggggcaccctgactctgcaggtgagaaccttctggggttcctaggaccctcggacaagcactctgatccggatgactccaggtcccaggagttgcagaaacgccaccaggaccttcagagcaccagttaga

SEQ ID NO: 13822 - DNA, 1188 bp, Homo sapiens
cacacacacacacacacacacacacacattggagaggtattatgattggcccagcttaggttacaaagtcatgagaaatgactgctcaaccctggaccaatcaactttagtcatgggatgggatcatataaagatatcacagcttccatggcaacaacatgatttggcttggcagaaagggaagtttctaaagtaaagacactataaggtacagaactttccaaaaggcgagttgctctaccacaaaagggatgaccatatggcttccatcctgggctgacatcttagcaggttgaaggagaagacccctaggaacgcgcaccaaacccataatagtagctatataacctccccagcgttttctgccatgtggttcctcagctgggaagataaatccccaccaaaatcaatcaggggtgccttccaaattctggtgacctgaaacaaagctataactgtagcaattaaccaaaaacatgcacccaatttagggagaaagttttggatacacagccaatctattagccatctcttcccaaggcaggtggtgacttgagaactctgtgcctggtttctgaggactgtttcaccatgcagtggctaatgaggttccggaccctctggggcatccacaaatccttccacaacatccaccctgccccttcacagctgcgctgccggtctttatcagaatttggagccccaagatggaatgactatgaagtaccggaggaatttaactttgcaagttatgtactggactactgggctcaaaaggagaaggtaagagatctgccgtgatggcgatataagaacaagggtggcctcactttccttatcttgctcctactaggctgaaaggtatggaaccaaagttacttctgcctcaacttatcagtgttgtggaagaagcttatatttcaaggttctattcccagcctggccatttccttacttcattgagcctcagtggtttcatctatgaaatgaggaattaactcctttaaaaacaagaaaataggtaaatatatcttttattcaatcagggtactataattgtgaccaggtgcaaagttctagtcacaaggtcagcaaattcgtattagtctgagttctcatcttcagtgaatgggacaatgtgtcttaactggtattcatgtcatcaaacttgggcttgacttgagactg

SEQ ID NO: 13823 - DNA, 1185 bp, Homo sapiens
ctttcaccagaggaaaaacatgccacttaaagtcacccaactgaagaaaatgaagtccaaacgcccaagaaatgtttactttgtttttaacacctactatactttgaatcctgtcatggtaatgttttatgcattgttgatctttagaagtcaaaaaaaaaaaaaaaagctcaatccagtgaactttatgttgaggcaatttctcttaataatgagagtatatggagatgtaaagtaggtaaaaaagaatgtcacgcttaattcagagttccttatctgctactaaaacccaaactgcatgtattaatcttgcagcatttgaataatgttcccattttgtctgttttgtggtacccccttaaagcacccattgagtttctggcttctctttagctcagaaaaccatagcaacctcagtccgcacttctccaactcaggatagagttcaagttgttctcctcaagccttcttgccgtgaaaatcgtggggaatcctgatcaccaactaggtgtcctaagacttcttgccacagataaagggcgggggagggggcgcacacgcacacacacatcctgcgtcgtttaattgggagagagaagggaaagtaacaacagaaaaggtaaaaggactttgagagttctttaaattgtttctgttagcatctctgagtgtctggggaacgtcggtttggcggccacgcactgccccccacctgccccccactaccccaaggtaagtcctcgtctttatcacattattcctaacgcgttcggatttttcctccttttccagcccgcacgttcacagacgggaggtgggggagggaggaggggggagaggcggggcgggaaggtagccgggtccctgcaccgcgccgctctcatttgcggcgctccgactcgggcgaagttctcgcgcagccggctcgccgcggccggggccggtcccggcgggcggcggcggcgggtgctcggagccgggcggggcggcggcggcggcgcggggacgcgcgctgtctctttaagggagctcggtctggggtggcgctttcctccgcgaaggctcctttgatattaatagtgttggtgtcttgaaactgacgtaatgcgcggagactgaggtcctgacaagcgataacatttctgataaagacccgatcttactgcaatctctagcgtcctcttt

SEQ ID NO: 13824 - DNA, 1181 bp, Homo sapiens
gcctcaggtgctaggattgtgtagaatcctgagtttctggaaccatctgcctgttgcaccaataccggctccctcccccacacccttcagcagctgctgaggctgaggtgccaaaaggaggggcccaggaatgcccctgtctgcaagtggtgccaggccccagcctctgggtgactcttggcaaggagcaggacggccgggagggacggtgtccctgcacatccccatgggcccctgcaagtccccgtgagtccgagcgtgtccccacgtgtccccgtgagtcccctagcgatccgggacgtccctgtgagtccctgtgtgtccctgcgaatacaggcgctgagctctgagtctctgttttgctttgattaggcctccatctcctagtccaggccttgctaccctcccccaggcctcaccctggaaacaccaccccctccctgttctgtgtcctgggaccccatctcctaggtgggcccccagcagccctcagaccaccctccgacgtgaggttctgtcagggaaccctgtgctactccaatgttgtccccagggcttactccctgagctgcctcccggctcagactggcccagccgctccccttggccggaaggagactgcatgggctgtgctgagctcagcctcctcctctttccgcttctgccaccctcccaccacccgcccacctgcgtctgtgctgggtttccctggcaggagctctgtgcacctgtccaggtgtgtctgctggaagctcccgctgctccctctgggcaggcacaggtgcacctgcaggcccagggaagaatgcagcacgccctccctccctgctgcccccaccctggctaaggaggtgaggggacctgcgcgggcagccgccctggctaaggaggtgaggggacctgcgcgggcagccgccctggctaaggaggtgaggggacacgcgtgtgcagccgtgggcagggctgtgggaggccccaggtggcctctcctggggtggggtgggggcggggctttcattcagcctctcttcctcccacagctcaagctctgggaaggccaggtctttgctcctctgcccagacgcagatgcaggtgcaccctgggtcctcctgtcctcgctgggtgttgagcggagacaggaggtgcctgcccaggtcccttgtcctgagagtgcctcctc

SEQ ID NO: 13825 - DNA, 1175 bp, Homo sapiens
gaaggggacagaatcggtataggcatatgacagtctagaatcaagacacaaggggtgtggagcgataaagagcaaacagggaagggaactagggggaccatggatccaggaaggggctggaaaagctacttctgggcacccctggaatctgggtatccagcttcgagttagaagggggtccttcaagagagcctcaggcgggggctgactgccgagagttactctgtcctccaggttcttcctaacaagaagctacgaagttcttattcagaaaaacggaacacgacatcacacccacgtgaaaaaaacgcttttaagaggccaagtcactttcacctcccaccaacttgccaaaggctgaaagcaggcggacacgcccccaagcgctcttctccgatttcattggttgccccggcctgctcctcattaggtctctctcactggtcagcaatgccgctttcacagccaattctcagaaccaatcatctccaactattgccccgcctctccaccacgtgagtggcataggtgccaaccaataaaaaaagaaaataaggatgtaaagacgagactccttccctttttcctcaactcgttcagtaaatggtagaaaaggtggagcagctgataccaaccaccaatccatgagggcggaaaaggatgatgagaagagcgatgggagggggtgacgtggcagtgacaggcgcataaactgaaatgaatggcggaaacagcagccaatcggcgatcagattggccgggcattccgcattctcccgtcctccctgagcgctggaaacttcaggaaagcaccaatgagcttccccaaaagtctgattggcctttatctgaaccaatcaaaggtgggtctggcggacgcgtcccaccccaggctctcactgggcgctgtagaatgacaggcccgagagaaatgccaatatccgcggggtcttcctcaagtgacactcagcggcaccaatcgacgtccttcttcccggcggccgagccctcctccccgcggctggccgggcggggcggggacgctgcgcggcggtggctgatgcggtagccgtgtggggcgctccgggcggcgacggcggctctcgtaggcggttccggtcttgtatctccaggcggcggcggctcatggcggcgacggagctgagaggagtggt

SEQ ID NO: 13826 - DNA, 1173 bp, Homo sapiens
tccttcactgtctctttgaagccttccagacaccaccccaatcaattatcccatcttctgtactaaggacacacatttctatgcgcccactcaaaaaactatgaaacacctaacaacctccctaggacatcgcagaggaactagtacccttaggactttttcattgacccgaggttctatgaatgcttttttatctaatcatatccgtccactatcaaaacactcttaccttgcacgactatttccctcctgggagttgtaagggggcaatgtgggctagttttcgggatgacggttctgagaaccacgtcgagctcacgctgcgcctctggctgcgatcccgccccggagctggtgaggaaggccagcaactccgaattgccacgggcgagactttgggagaaatcctcccaaagcgaatccagatctgcggcggggaagtcgccctcccttccttcagcatggccggggtgcccggagtccctcaggggcactgaggcggcttccctctgtgcctcctcttgctggcactggccctgggcctcctcaagttcgcaacatgccgtgccctgctcgggtcctgatagcgacctgggacccgggccccctccgggggaaccctggccgggtcccggaccccgctccttctgctccgagcctgcgctagtcccggggccgcgggcctccgcgcagggcagggcggcgctccagcgggcctccaggcgggcgccgcaaagccgtttgtttgccacctgcggcctctccagccacacttcgaccgcagcccagaagccctgtgggagaagcgcgcctgggtagctgatcccggtacggcccacctcagccatggcagccagcaggtgtacagccctggcagcggcgcgccgagatgacgcagcccggtggcgcggcgcgttgacgtcatggaggcggggtgctgggaccggaaatgagaatggcgccgctggagatcctttcctgcttttggtttccctggcaggggttgaactgtggagtgtgtgggtgaggaatttgacctgtgttttattcccttttgagagaattctgggcgtggtatagttacagaatcaaacatcagccagccagcgggtgtggaacgcattgtcctcagtactgattaccgataaaagtcagggagcctaagtttgtgaa

SEQ ID NO: 13827 - DNA, 1168 bp, Homo sapiens
gtgactggacagatctgggttctctccatctctccgaaacccttgctggggatgagcgatctgcatttttcggtcctgacttttgggaaactctccagatccccccatcctgcaggccctgagaagagcagcccctccctactgcgcagttctccttgggaccctgtatgcaggagagagctgatactccgtgccccgtggcccatcccaccgcctgctggccctgctcccatcccctcagcttcctccctcctctgccctctcgtcatctctgaattctcaggccctgccctctctgtgcccttccctccacctgacagggtctggctcaaggtcactgcagtaattccatacccagctgcccagggctgctgctgctaccgccaccgccttatcggccgctgggtttctgttacactcccttttatttctgggcatatcgtgttcgataaaaccctttgcttgtaacactgctggcagcgctcccagctgctccctcccgcgttcccgcgttccttcctttcctcctcccttctctgcgcttgggcaggcttcttcctttcctcctcccttctctgcgcttgggcaggcttcttcctttcctcctcccttctctgtgcttgggcagcctcaccttgtcccctcaaactccagagaaggaaaatcaaggtgcctccccatgtttctggccccgcccttccccccagcccctgcaggggtgtgcagagaatgcccaccttctgtgagaaaggtccaggcagggccgctgggcccacaccgagagtcccctcccagaggctggtgcccccacacaggccaggccggagggccagggcagccaggtccaggtagggctctggtgcagtcacagtgcccgactggttctgctagttccagcggccagccggtaggggcgtgtgctgggcgggctttggtgcacattatttcccatcttgactctgccacccccagccacgggttggggaggtgaaggcaggtctgagtcactagcaagggggagggcaggagttaaacaagttgtggccgtggcattcccacagaaggcccacgacccgctggaaggaaagagatagcagacaaaaggtaggctgcgctgtgggccaggcactctccacctcgcccactcccacggtatcttattctctgg

SEQ ID NO: 13828 - DNA, 1167 bp, Homo sapiens
acttgaagcaagtgcgcctcccgcgtcctgaagcccttctcggccctggcctctcaccccgcagccccggacagtaacagaagggctattttaccgcccagttcctgccaggagggccaatcagagccttcgccgttcccgagacccgcccccttctctcttacagtttgttaaagacacaggcgtgtaatttctaaaggataacgcagggtattttaattactgggtagcagaagtgaggacctagaatcacgcggagatgtgaccaatatttcctacccttctttaatttttcttatttttaaaaagtcaaatttaagtccagagtcataagaagtatatatttttttaacctggagaagaaacagactgcttttagatctgaacatgctggtatttctgctgttcgcaatagataaaatttggcggggggtggggggataatgtctctccagggacttgccaatcttttcttttcatttcttaaaacaaacaaacaaaaaagcaccaccatcattaacaacaacaacaacaaaaatatgcccaaaggacaggatatcaaatagcagttgataatactttggggaaagcacatgaaaacacaaattacagctcttaggaaatttattctgttccttagcctaaattggactataatactggataacaaagctctaaaaaatactgaaaaccaacacagcaggagatccacaacattcaatttcaatgttttaacagtccctgctatctgaaacatttttctttcatttaaaattaaatcccacctggtacatattaggcccattctattgctcagagaattttggagttcagttaaaaagtcagcctcactctctccttttccttctctccggtttcaatgaagagtcctagctccagacctccaactggagaagctcagtctccaccccaactccctccctccttggcctaagtttgtccttctgaggctgccatcccaaactctactcctaatccctccccacacccaggtttgctcttttaaaatagttgctttcttaggaaatgtagttgctttcttaacctcatcaaattcatgaagatttagccgaggcccatggtgagtcttaagctggatatctctcatgttttaaaagatgggtgtttgaaggagcaactcacaag

SEQ ID NO: 13829 - DNA, 1166 bp, Homo sapiens
ttctcagacaccacatcttggaatagagtgtcagagcaataaactaaacccatttccattgggacagcccatttggagaacattcctgaaccaagggtccttgtccagctatgcccccactttgatccaggtgatcctcagctttccccttggatcttaaaacaacattccactacccctctgcctccatctggactccctccaggctcagcttgcttttagcagaatcatgttcccagaaaacacttttctcatgtctcaccctgctgctaggaagtccacagggcaccttgcttccacagggaagcaagagagatttggtctcttaagtcaggctccaaacctctttcaaagctgacctagcacactgttgaagaaaaggatttggagcccaacagatctgagtttgaatcctggctcaaccacttacaagttgtgattagacatgtgatttaacctccatgatcctttctcatctgtaaaataaggatggttaaacataactcacagagctcttgtaagctgaaacaagatgaagtatgcatgctgcctggaacagagtagagtagagctccacaggtgtgaattctgtcttttcagtttcaccagccttgctatgagtgctggattcatggctgatagactccaggcttgaggcctgggtactagtgacccatagtacatgtggggtagaccctggatgtttgttttcttccattactggatgaaatgttctgtgtgggacaaggggcccatggggacccagccagccaaaaatgagctgctctagggccctgcttatggtgcaggacactaggacacccacgcctggccataccaggactttgttcgtgggttacctatagtctcgctgaactttacaaagaaaagttcttttgagttgtgcttctgccctttgaacctcttatcttcagagtcacaaacctggcccactaggctataaaagaagctcattccagtgtattctccctgcagcctgctccttgccatccaccacaaaccctcaccgaaccagtggccaccaccatgacaagggaccagaatggaacctgggagatggagagtaatgaaaactttgagggctacatgaaggccctgggtaaggaggagactggggatggggagggtagctgttgttgggagta

SEQ ID NO: 13830 - DNA, 1165 bp, Homo sapiens
actttatcccaaagcgtccatttactcttctgtgaaatactactttatagtgttgtttggcctaaattaaacaaaccatgcaaaaagcccagccctgtgcctggcatacagtgagtgctcatgtgtttgctgctattatattctcctaatccagtttgaaagctgtgaggcagcaactttccaggaaaagatggcttcagccaagggtatgttcctaggacctaccctaaagttagtctctcctattagagtagtttgaagctgaacttggctgaaaactataagaaaggctggtttaggggaagcctttgttacttttagtttcttgagatctcttcttgacctaactcttcaatgctcaccacgtgtcatccattctccagcactgtttctgtgtacctgactgacagtttgcctcacagtaaaatgattcctctgggctccctaggtgaaaggatgttgggcatagcaagttgtaatgctgttgatctcagaaatccttccgatgctccaaaaaataaagcaatgagcaagacatgtctagccagcaggaaatatccttcatacaaaatggttaatttctaaaacctgtggcatcaccttgacagatctcttctgtttggtttatacgggggaatccaactggaagagtccttcctgacccttggtctgcctgggcagaggaggtactgtcctctgaccatcagattatgttgggtctagcaggctgccttcttccaggctttgtgcaccaacattaaaaaggcagtcatttctcaaaattgtttgggaaatgattaacttgtttcctttgatcctccctgctctgtgtgaggacagtcaagtagcagaggtggagaatgtgttctattattttcaacagtgctaagtaaacactgggggaaattctgccactagagaggtacaactgtgtttgagggtttgaaggcgtgcgcgcgtgtgtgtgtgtatgtgtgtgtgtgtgtccttctgaaaacatagagctattgagtacaaaaatatggccatttcctctaaattttctttcccctgttttttttttaaggtctgaatttcctgctgctgttcacaaagatgctttttatctttaactttttgttttccccacttccgaccccggcgttgatctgcatcctgacatttg

SEQ ID NO: 13831 - DNA, 1162 bp, Homo sapiens
ggccactagaggagataaagggaaacagattgttataacttgatataatgatactataatagatgtaactacaaggagctccagaagcaagagagagggaggaacttggacttctctgcatctttagttggagtccaaaggcttttcaatgaaattctactgcccagggtacattgatgctgaaaccccattcaaatctcctgttatattctagaacagggaattgatttgggagagcatcaggaaggtggatgatctgcccagtcacactgttagtaaattgtagagccaggacctgaactctaatatagtcatgtgttacttaatgacggggacatgttctgagaaatgcttacacaaacctaggtgttgtagcctactacacgcataggctacatggtatagcctattgctcctagactacaaacctgtacagcctgttactgtactgaatactgtgggcagttgtaacacaatggtaagtatttgtgtatctaaacatagaagttgcagtaaaaatatgctattttaatcttatgagaccactgtcatatatacagtccatcattgaccaaaacatcatatcagcattttttcttctaagattttgggagcaccaaagggatacactaacaggatatactctttataatgggtttggagaactgtctgcagctacttcttttaaaaaggtgatctacacagtagaaattagacaagtttggtaatgagatctgcaatccaaataaaataaattcattgctaacctttttcttttcttttcaggtttgaagatgccgcatttggattggatgaattccaaattctgcttgcttgctttttaatattgatatgcttatacacttacactttatgcacaaaatgtagggttataataatgttaacatggacatgatcttctttataattctactttgagtgctgtctccatgtttgatgtatctgagcaggttgctccacaggtagctctaggagggctggcaacttagaggtggggagcagagaattctcttatccaacatcaacatcttggtcagatttgaactcttcaatctcttgcactcaaagcttgttaagatagttaagcgtgcataagttaacttccaatttacatactctgcttagaatttgggggaaaatt

SEQ ID NO: 13832 - DNA, 1162 bp, Homo sapiens
agactccgggccaagttctccctccgctcgctgctttctgccgcaggacccggatcaataaagggaaggagagccgggaggaaatgatggagaacagagagaaaggagatgcttgatttcactcgccaaggagtgagtgctcatcggcagacactgggctctggccacgcgtcttagactccaaatctcggctcactggtccctttgaggaggtcgcctggtgttcccgtagccctccaccccaccgtaggagagcgcctgccacgagctccgcgcctcgctaagtgctttgctacgtgaactcttagttttcccaacatccctaagccgccgatacattatcacccacgtattgcggacgagagaaccgcctcggagaagctggctggctcgcttggagttttgcagctagtggcggagcgagcattccgagcaggtactgtgcgatcctccagcgccggccgcagctcacagccccttagctccgccgggttattgtgcggccgcgccttctgcacctgttgcggccctcgctaggcgggaagggagggagaagaggaggacaaaggggatgaccaggtggctctcccccgacggactcccggcccagggagcggatagaccactcccagagagagtgtggctttgagccttggagaggatgctctccttctccagggatcgcctccccagcggacgcagagtttcagggaaatgtccgcctccgccacttgggatggcagtggggagaggaggatctgggtgtccggaggagggcagtgggagaaagctggagctgctggagtcgcagctgcctgcggagcgggcccgggaggaagcggggccgagcgtgcggcgtccacgcggtgagtgtgcagcgctttcattcaaactttctccagtctcggttccggcgtcagcaaggtgtgaccaatcagagcccagagacgggaataaattatgcaaatcaccatctggcgatgggtcagatgactcccatacttttaaaaactacctctataggagcgtgacagcagcgagtccttgcctcccggcggctcaggacgagggcagatctcgttctggggcaagccgttgacactcgctccctgccaccgcccgggctccgtgccgccaagttttcattttccaccttctctgc

SEQ ID NO: 13833 - DNA, 1159 bp, Homo sapiens
gactggaggccctggaggtccgcagctgggctggtccgggtcctagggcgcccgcttcccagctgagcgcgcaggaggggccccaggcgccggggcggggtcgccgcctcactcaccttctgtgcttctcttcgcctcccggtagcgctcccacaggtagcgcttcatgtccggggcggtcccgggtgcagtgcacaagggccgggcggggcccgcacacggccgcccccgagccgcggtcccgcagccaccccgcaaagccgccgctgtcgctgccctcgccccggccccgcgtgccaccaccgccgccgctgccatggtcatgcctgctgcctgctgccgccaccgccgccgcgccgctctgcgactgctgctgcccggcccaagatctacccgcgctctgccctgcaggagggcagctcctgcgtcggaacacgtggcggcgcaggcctgccctcccgccgctgcggggcggggagtgggcggagccggaggcggggtctaacgggggcggggtcgatggggagtgggcgggtctgggacgggggcggagacggggcggggcggggccgggccgggggccccacgcccagcctgctgcggtcaatttcagggtggcgcgggggtggccgtgtggtgtggtggcgcgcaggccacatgggatggaatgatgaggtacgaccccagcgccgcccgcccagctccgccgcaccttcgtcctgccttctgggactgacccccagctctggccacaaggacagcgcccctcccaccccagctgctctggccccggccctagaaggtgacctctctccgcattaatggcctctggcagtctaattaatggcagtctggacctcccctggatcgtggggcccctctgagacgtccccgatccccagcttaaatttatccaggaggacctgtgagtgggtggctgggccgaggttccactcatgggctgatgtcggctggaggatcccagccccttaagacctcagtaagtttgaagggccctcccattacacagcctggaaggccaatgcccgccccccgcctaggtttccgcctggcggcagaggtcattggaacatggtcacccagctcctgcccctgcccacgctaacggctcggtgcacaggtcttctctcaaacctgc

SEQ ID NO: 13834 - DNA, 1143 bp, Homo sapiens
ttagccaggatggtctcaatctcctgacctcgtgatccgcccgccttggtctcccaaagtgctgggattacaggcgtgagccaccgcgcccggcctccgctttcaagactaaaaattgcctgggcactgtggctcaagcctgtaatcccagcactctgggaggccgaggaaggtggatcacttgggctcaggagttcgagagctgcctgaccaacatggcgaaaccccgcctctactaaaaatacaaaattagccggtcctggtggcacacgcctataatcccagctactcgggaggatgaggcaggagaatcgcttgaactcaggagggggaggttgcagtcagccgagatcgcgccattgcactccagcctgggcaacaagggcgaaactctgtctcaaaaaaaaaaaaaaaaaaaaaaaagactaaaaattgtcggggctgctggccaaaagaagatcttgcctggctgtcagaaaataatgttctttccagcggctgcttgaacccgcttccttcagtgcctaaatttaacggctgcagctgcagctgcaacctgtttcccccgtaataggaatgaaagtggaggataaaagaggttaggaagaaggcaagccagcagtctgaccagacacaggatgcatgtaagagacttgttaattacacgttctatttaggtcacactgataggcaaatcgctattctgggcccccaggaagccttttcgtccttgctatagtcaattcattctccagatgaaagcctgaaagcgccacgacccaagtttcacgtctatccactcaagaggcctgcttggcgcaggcgcataccttcaaaggcctcccgccctcactccaccacccccttagggggcggggcctcagagctcagtgctcgaactggctccagagccgtgagttcggcatgcaagagcggaagaaacgcggctggtaccccggaagcagtcgctgcaacttccgggaggtgcttgtgtgcctggtgcgggagctacggggcccagggattgtgtttaaagtagtgcttctaccaacatgtcccgtggttccagcgccggttttgaccgccacattaccattttttcacccgagggtcggctctaccaagtaggtgagtgaaccaggt

SEQ ID NO: 13835 - DNA, 1140 bp, Homo sapiens
atcaaatttctggaagggtccatggaggcagggttgtcaatctcattacagcatttcagaggcctcagaagatttggaaatgaaaaaagacaagcagcacttgtggctcacctgtgtcacaattgtggctcacctgtgtctctgcaatgcgcaagtgagctgtgtattgcagagacacaggtgagccgcaatttcctcccagttaggaggtcaacgctaagacccttgctctctttccgtcgaacatgagatgccaatttctttctgggcagaggacaaaataaaaattgtctataaactttggccaggtgtagtggctcacgcctgtaatcccagcattttgggaggccgagatgggcagattgcctgagctcaggagttcgagaccagcctgggcaacatggtgaaaccccgtctccactaaaatacaaaaagttagctgggcatggcagcgtgcgcctgtaatcccagctactgaggctgaggcaggagaatcgtttgaacccaggaagtggaggttgcagtgagcctagatcttaccactgcactccagcctggatgacacagtgagactccatctcaaaaaaaaaaaaaaaaaaaaaaaattgcaaatttttctttgtgacaaattccaaaattattagcttcgttcaaatttactttcctttttatctttcaatgtcgtcaaggccaaaagcattgcttaataattttgtttctaaactcatattgcagcacagggcatgatctgtccccaaggcaaagatgatgagttactcttttcttgaaaacatataagcaggtatctcagcaaaggctactcatgtattattatgagtaaatcattggcagtgaatgtgaatttttttttaaatgaatgaataagtacacgccttcttttgagggcaggttctatctgtacttcttccacttactatattataggagcttagaatcccagctgctggctctgggctgaagttctctgatggctcgtgcagggtggactggcctccttcccctatatgtgtgtctactgctgacctgtggctttgccaaggcagggaagctgctggtagtgcccatggatgggagccactggttcaccatgcagtcggtggtggagaaactcatcctcag

SEQ ID NO: 13836 - DNA, 1124 bp, Homo sapiens
aagctaggagtgggatggaagtcgaggtccctaattttttaaggggagggtgcggggagaaggggtagtatgcggaaacagagcgggtatgaagctggctaacgccgcgcgccccctcccaggacccgctcctgccccgcgccggccggtcctgggggcccgcttttttatggaaatgaggagggggggccggggccgggggcggggagccgggagccgtccccgctcgctcactgcggctttctctctcgctcccctctccccgctccctgccgcgctcactctccgcttccccctcccgctctcccagagtcgatcccggagcccggccgcggggagaggttctcggcagagaagacaaagcccgcagcagcgatggggggagagctgggctctgcgtgttgtgggggccaggaaagggtgccaggctggggctggaaccccctggcaaaggatggggtcccctcatccctaaacagcaagccatctcccctcgcccgccccccgcccccccagtctcggagatctcagaggcaccgactgggaggtgagttagttcacgtccttctgctcggtggagggggtcgggagggcggtggagtgatgaagtgcagaggttgaaggagtgcagggacagaactgggggtcggacggagagtgggcaggcaggaaaagtcttaaaggcctggggtgacttaaccgtttggggtgagggccttgagctttggatatgacaggagggaggagagaccaggatggactgggaacccaggcttccttcaggcctgggctgtgaatacagcttggggtgatctgtcctttagcactcatcgtaatttccactctgtttcctccacctctctcccattgaaaacctattcagggccgggcgcggtggctcacgcctgtaatcccagcacttcgggaggcagaggcgggtggatcacctgaggtcaggagttcgagaccagcctgaccaacaaggtgaaacctcgtctctactaaaaatacaaaaattagccgagcatggtggcagacgcctgtagtcccagctactcaggaggctgagacaggagaattgcttgaacccgggaggcggaagttgcagtgagtctagatcgcag

SEQ ID NO: 13837 - DNA, 1119 bp, Homo sapiens
tggtgctttcagacaaaacttcaccaggtttaaagagaaaactcctgactctacacgtccattcccagggcgagctcactgtctggcatcaagttccccatggtgagtttccctgtacaagagtccaaggggagaggtaagtttcctttattttgctggatgtagtttaatattacctgaggtgaggtaaggtaaggcaaagggtgggaggcagggagtccagttcagggacggggattccaggaggagaagtgaaggggaaggggctgggcgcagccttggggtctctccctggtttccacagacagatccttgtccaggactcaggcacacagtgtgacaaagatgcttggtgtaggagaagagggatcaggacgaagtcccaggtcccgggcggggctctcagggtctcaggctccaagggccgtgtctgcattggggaggcgccgcgttggggattctccactcccctgagtttcacttctcccaacctgcgtcgggtccttcttcctgaatactcatgacgcgtccccaattcccactcccattgggtgtcgggttctagagaagccaatcagcgtctccgcagtcccggttctaaagtccccagtcacccacccggactcacattctccccagaggccgagatgcgggtcatggcgccccgagccctcctcctgctgctctcgggaggcctggccctgaccgagacctgggcctgtgagtgcggggttgggagggaagcggcctctgcggagaggagcgaggggccctcccggcgagggcgcaggacccggggagccgcgcagggaggtgggtcgggcgggtctcagcccctcctcgcccccaggctcccactccatgaggtatttcgacaccgccgtgtcccggcccggccgcggagagccccgcttcatctcagtgggctacgtggacgacacgcagttcgtgcggttcgacagcgacgccgcgagtccgagaggggagccgcgggcgccgtgggtggagcaggaggggccggagtattgggaccgggagacacagaagtacaagcgccaggcacaggctgaccgagtgagcctgcggaacctgcgcggctactacaaccagagcgaggac

SEQ ID NO: 13838 - DNA, 1114 bp, Homo sapiens
tttttgagatcttgctctgtcgcccaggctggggtacagtggtgccatctctgctcattgcaacctccgcctcctgggctcaagccattctcttcccgctaggattacaggtgccggacaccgcacccggctaatttttgtatttttagtagagacggggtttcgccatgttgaccaggctgctgttgaactcctgacctcaggtgatccgcctgcctcggcctcccaaagtgcttgtattacaggcgtgagccactgcgccaggctaagaacatgaactctggtgccaggtaatcctgctttagcccttctgaagcccaccgaccttgaacctagtgtcttcccgtgcctgggccagtttcctctgcatatagtaggaaatagtacgacctcctggtgggagttcatattatacagtcagcgcttaatgttggcccgtctgtactcattcctttacctgagtaaactcacagtactgcaagttttcttttatttttagttaacatgatatatacatgcatgattacaagctctgctgcaattatgtccttggacatttcagctgtcgcctattattccaccattatgaaacagctgtgtgatgaactttagcgggagctgtttgcttttctgtttttttttttgtttgtttgttttgttttttttaagacggagtgtcgctcggtcgccaggctggagagcaatggcgcgatctcggctcactgcaaactccgcctcccaggttcacgccattgcaggagctattttctttggccaggttcccactggggcaaagggtccatttctgagcctggctctatgtaaggcaaccggaaatcgactgcccttagtaaagatggcggaaagaacggcgtcattgcctgtcaggttgcggcatcggtgccctcgctcaacatggcggccttctgtgcccgccccctccgctaacgggcacgttactccgtccgaacgcagtagacgaaggcggcggcgatggcggcggggatagtggcttctcgcagactccgcgacctactgacccggcgtgagtcacctcttgccttatgggggtgcgtcgcgctgtcgtgctgttatagcagatgtaggacgggga

SEQ ID NO: 13839 - DNA, 1107 bp, Homo sapiens
gactcagggagttcaaaggaagctggggtgcaccccgtcctacccagcctgccaatggaagcagcagcccttaactctttcctggttgtgccctgggcaacatccaggtggtggtccatgctggagaggggtctgcgcctcctcagaagatgaaatgggtggggtgaccctggctatagctgggaagtgcaaccagacacccaagagtggggaaactgagcgagagcctcctgtgctccctgaccccagatctcccttgggattccctcctcctgcgtggcggtccctggagaaccctggcttctgggtggatgcaggggcgctgggattggatttctggcatgatgaatattcatcagcttgagccggcctctgcttctgtttacttagccgggaggggctgggtttcaggttcaccttgactccaggagctgcagcagagcaggtaacagctcttgcacctgtttctcttgcacctgacgtgcagctgctcctacccacctctcctggctgagccttgcctgatacagcagcccggaggcaccacttgcttcccgagtctcaccctcccaggcagctcctacactcaactgcttctctaggaaaggtctcacctccagcctggagcagtcgggattacaggtacaggcagagggctggtgggtggggaaaccaaggcatagaccccagtcagagcacctggttctgcctccagggctgacaagcccagcaggaaagaggaacccaggcctctaacctggtctccactcaagactcatcccactggcctcttggagtcaatccaggcctccaacagagctcctgctgagtagttttctgttaacccttgctgaactggagcccacccttctgaccccccagtctggagcatttttccagctgtctggtaggaacatctccccattcctatccagggtacccctgtctcatcctgcaggccccctaagtgccattggggccctgcagagggatgggggagggagttctggggttttgtcttacaacatattagctgacttgcttcccctatctgtccccctgcccctccacctctgccccagtcaatggttaacttgacccagctca

SEQ ID NO: 13840 - DNA, 1104 bp, Homo sapiens
cagagcatatctctcccctgctacctgggagcccatagctggacctgggtgagcactgggttttaaatttttttaattaaatgagaagatgaacgagagatggctttacagtaacacactccagattcttactcatcccagccaggaaaacagtttcaatattgctttctttcacaagacttcccatgatgtactgaaggagtagtggaagtggaagagacaaggagatgttcttctccactggacaaggccacatgcaggggtgggaaaaacactggcatggaagctgcaggtgacttgtagcaagtcacaatccttcctgagctctgcatgcccatctgtcctgtgggagtcccttgtcctggtccctttggttgctgggagcctcacagagtcatgcttacagtttgaaaattgtcaagcctaggtgtaaggtcgcatttttctgtttgggccagtgccttatgcttctgataggagcagcagagggaagaggcataagatgagcatgaatacagttggtgtctgcctgcctttgtcccagcaggctcttccgacacatcttgggtcttgctgcagctgtcgctcccccaggggaataatctgggagggtgcagtgagagatctggaaaaaatatcctcaaactccctggccttatgccctgtccacctaagaattcaccatcctggagtggccctactcctaagcagagtggctttcccctcactacactttgtccctcaccctggcacagacactgtgtggtgggagaactgatgctgggaaaagtactgttgcctggcccctcctcctggggccagttggcagccacagacactgtttgacacgtttcccctcccacccgctgcacacagcagatcctgcccagaaggacacaatgcttggcaagttctaccacttccagcgtttggcagagctgtaccatggttaccatgccatccatcgccacacggtaaggtggctgggtcaccagcacctgagggtaccatctcctgagctaggggtcccgggcatatctaaagagcagcagactggatggaatgtaacccactggtcacagtgaactgctgaggaatcttggt

SEQ ID NO: 13841 - DNA, 1097 bp, Homo sapiens
ttgtgattctgtgtaccgaggacaggaactcctttaaaaaagagtggatcaaccactctcctgtaggggtcgctatgagagtagcagtctggcatccttcctttgccgcctagcaccttgtggcatgacttggcacaatttgcctaagggttgtgagatctggcttgttttggtattttatttttcagaatggtatgagctctaagtccaccaaaaattctgcaagctcataactatgcattcttttactttggttctgtgtatgctgcatatgctgcacctgtgctttttttttttaaccacatatttggtgcgtggttattttagacttctcatcatactccatttgcatatgacaaatatatacacgtagacaccattttagcagcttttgcagcatgcatgatggtggctgaaacttggccttctataggatcccagattattatttaatggggttgtcactcaggacacttactggctttctccagtgctcttaaaaaattgaattgagcatgatgaggtgcatccccttgattaaatgtttttcctcctatgcaatcaccattagctgtttggctcccattctgtattcttctgaagcagccctgcattgcaaatcaatatctttctgaaaagacagtgtgttgtgaattgccttgacagcatatgcacggttactttggctgcaatgctgctgcagagcccggttactctgccttcgtgggaactccacaggcaagtccatcgtgtttggaaaaaaaaattagattttttggagaaaataattgagctgttaaagctattgatactgaatgttagcatgtcctttgagttcttctcaacagtttttggtcttattccactgagattagcttctcttaggggatttctgggcttttttttttttgcttgcttatgcatccccctctcttggttgtagtacggccgtaccatttcagcttgctagtgcagaaagatgtgaattcagttgctgtatgagcctggcctggtgcaaacacattgctagagacatgttaaagagttccaggtgaatcaagcctgagggagacaacagcaaaacggtaagacagagc

SEQ ID NO: 13842 - DNA, 1090 bp, Homo sapiens
aagctccctccctactcagtgactgctctcatacttcttcactgtagctgttggctctcagaacatgatgcccaaagtatagcgcctcggtgtgctgagtactttgaactgaaagacattggaagggcctccgaagaaagatctctttgaccttctcctgccctcttgtctttcatgcttctttctcccctggagtgaaccatggaaactagaattcctcttccgcaagacaatgatagaaactagaagccctttccccaaagcaagccataaaacttaggaaggtcactctctcccttctcccttctcatttgaagacccttaatccagaggaatcctgccccatacttgcaaagaagaaatgctacacagagagtccaagaagaatttgaacccagtctattaccattagatcatactcttgtccaaacacatctctacagagctgcccattcttcatggaacctaagcacaaaaacagttttccctggatctttgggtcttcatttctgaaggctctcatatcacataaaactttgattaagtaaatttgttatgcttttctcttgttaacttgtcttttgttataggagtgtcagccatgactcttacaatgagtaaggagaggtattacctacctccttttacccctacatgctcttggagctgattatcacagtttgtaatttttccaccttccattcctgcttctgtgtattttgataaatttttgcaggtcagtagacttcccatggcagaatatttcctgcttctcaccagcccttaagccaatccaaggaaaacaaaagaacatcataatgctttgtcatatgacaagattacaaaagcagcatccagtggcagaatgcccaactgctccgggacacagccaatagctgacttcagtgctccccatccctgcttgtcagtgattagtctaaattgttatcacaagcccagtctgaccaatgaatgtgagtgaggggccattttgattgtcagctcctgattctgcagaaaacacgaaactgagctgtacaaagatgctgatgaggggctgcagcatgcaattcacttcaccagcagtcac

SEQ ID NO: 13843 - DNA, 1085 bp, Homo sapiens
ttgctcctaagtcctgcaaattctcaggggattgaaataagagactgtggacagatcaacattaggaaaaaattcagtttgcatgctttggcaataagatgacaggcaaagcattctgatgtgttactcagattaacactgtctttaatgggatttaaagagttttctgaataggacacttctgaaaatgccttctgatttctctccattgctctcaacaggtgtgtgatctgtatgatggactttgtttatggggacccaattcgatttctgccgtgcatgcacatctatcacctggactgtatagatgactggttgatgagatccttcacgtgcccctcctgcatggagccagttgatgcagcactgctttcatcctatgagactaattgagccagggtctcttatctgacttcaagtgaaccaccattttggtggttttgatcttttgtcactgagcccaaagagccagggattaggaattaagatcgtgcacaaaagtttccttaaaattcctggatggctgcagatgttgggggaaaaagtacgtgatattttagaaacttagtgggaaaagtaggatggtatttttatgtaaagccttgacccaatgtttaaaaatataattgtatttagatcttgttattgctccagtacataggaattgtgtaaagtgttaacagcagctgtatttgtttaaattgtgtgtattgaagattaggaaaaagatagtagttatttttcctaaatgaaataactttcttctcttccccttccccacccgaattcttttctgaagttgctggcatttgggtcaaggttttattaaaagctacattttataacactggcacacacaaaaaagtagttttaagcttgtttgcacagttctttttttccattggaaatggaattcattgccttaggtctttttaaatagtgtattattatcgttggggctggctctatgcttgaaaaccagtttatttataacctgttataagtgctatattctgtttgcagttaggaaatgcagaattcaaagtgatctcctagcttgtaagcaaactgagatgcactatccc

SEQ ID NO: 13844 - DNA, 1083 bp, Homo sapiens
tccaagagaaaacccttcattcaatttcctaattaaataaattcattttcatttgtccatgttactatctagtctttatccatacacttattatttacatttttgtagtaatagtacaggtaattttttttttttttttaaagatggagtctcactctgtcgcccaggctggagtgcagtgtcatgatctccgctcactgcaatctctgcctcccggattcaagcgattctcctgcctgtctcccgagtagctgggattactggcgcccgttaccacgcccggctaatttttacgtttttagcagagacggggtttcaccacgttggccaggctggtctcaaactactgacctcaagtgatccgcccgccttgacctcccaaagtgctgggattacaggcgtgagccactgtgcctggcctatagttaagatttttatattcatttttagtgaatgttataccgtataccgtaagtactctccccccacaatccttctgcctctcatcttcccttttccattttcctaatacctcctactgcctcctctcaactacccttgtgtgtttcttcatctttctccgtgcttattcaaaaatatcctgccacacacacacacacaggcttctctttttgttattcagacatttaaaaaaattaattcttgatcattcaacttgattatttagacatttctgtacagccatcttttctcgtttaccaccacatcatggctgtctgcccctctacatccgcacacggagctctaacgcatgcttgttaaacagccttcgtaatagtctttaaagatcaaccacactgttcccacgtaaccctacctcccaggtagggttcccccagtaacactttcacacataacttatttactgttccttttacttctggaagattccgagaggaaagattgctgggtcaaaggtcacacgcgttttcaattttaatagctattcctggattacctcctcaaagggctctaacaactcgcattgctctcagcgtgtgagagggtcctttgctctgaagggtcttctaaaatatttgttcaatcgttacttagcagggg

SEQ ID NO: 13845 - DNA, 1069 bp, Homo sapiens
actagcctcaaccctgtacctcccctcccctccacccccagcagtctccaaaggcctccaacaaccccagagtgggggccatgtatccaaagaaactccaagctgtatacggatcacactggttttccaggagcaaaaacagaaacaggcctgaggctggtcaaaattgaacctcctcctgctctgagcagcctggggggcagactaagcagagggctgtgcagacccacataaagagcctactgtgtgccaggcacttcacccgaggcacttcacaagcatgcttgggaatgaaacttccaactctttgggatgcaggtgaaacagttcctggttcagagaggtgaagcggcctgcctgaggcagcacagctcttctttacagatgtgcttccccacctctaccctgtctcacggccccccatgccagcctgacggttgtgtctgcctcagtcatgctccatttttccatcgggaccatcaagagggtgtttgtgtctaaggctgactgggtaactttggatgagcggtctctccgctctgagcctgtttcctcatctgtcaaatgggctctaacccactctgatctcccagggcggcagtaagtcttcagcatcaggcattttggggtgactcagtaaatggtagatcttgctaccagtggaacagccactaaggattctgcagtgagagcagagggccagctaagtggtactctcccagagactgtctgactcacgccaccccctccaccttggacacaggacgctgtggtttctgagccaggtacaatgactcctttcggtaagtgcagtggaagctgtacactgcccaggcaaagcgtccgggcagcgtaggcgggcgactcagatcccagccagtggacttagcccctgtttgctcctccgataactggggtgaccttggttaatattcaccagcagcctcccccgttgcccctctggatccactgcttaaatacggacgaggacagggccctgtctcctcagcttcaggcaccaccactgacctgggacagtgaatcgtaagtatgcctttcactgcgagag

SEQ ID NO: 13846 - DNA, 1069 bp, Homo sapiens
ttctctggagaggggtaaaacattaaatgaattcacactgaggaaactggccaggtacaatggcttatgcctgtaatttcagcaatttgggaggccaaggcagacagattgcttgagccccagagtttgagaccagcttgggcaacataatgagacctcgtctctacaaaagaaaaacaaaaaaaaaaattagccaagcatggtggcacacacctgtagtctcaggtatttgggatgctgaggtgggaggattgctttagcccaggaggttgaggctgcagtgagccatgaccatgccactgcactccagcctgggtgacacagcaaaacactgtctcaaaaaaaaaaaagaaactcttcaggctgatcagatctgcttttctctgatgagtttcttaggagctctacatttctggttgctgcaataggcaaagtatagaatggaggtcaaggcctcaaatttctctgacttcccagctgggcttgagagtgactctggccctcaactgagggcattagtaagctgtccttaagaacgagagtgtattttctggctgtattcttaactcatttcactatagagccatgtctgatattaacagtgcagtgctagactagagaggcctggcactcctacagccttctcctgtcttctagctgggacttcacaccacagacccaaaggaaaagagacccaaagatccctgcagaaacctgagaatatttcctttacctcagtggtttcataatctgttcttagtttcctgtttctgctgtaaataattcactatatttttaagagagagaaggtcaggcccttgtgagccagaagggatttgagagatgatgaaagctacgtatgttacccataacctaaggacttctggcaaggtggcctacctgagctggagtcatgccttttttccctggacttggagatacctgtcagtgcagaaaggcctacttttgatcttggaaataagtttcctggggtgagttcttaaccctttccagctttcccaccctctttggctttagccatggccttctgatctgtgtttctcagggg

SEQ ID NO: 13847 - DNA, 1067 bp, Homo sapiens
tggtagagatggggtctcattgtgttgcccaggctggtcttgaactcctgggctcaaatgatcctcctacctcagcttcccacagtgctaggattacaggcgtgagccacagcacctggcaacacattttgaaaataatattgtttcttaataagcagatcttactttctgccatccctaacattcctagtcaagaaaaaaaaaatggcttcaactttttgtccaaagctttcaggatatattcctaaagaaatctcagtaatatttcttctggcctttttgagagcaagatttgaagggatttttgtcgtactcttttaaaaaagcaaatgagggatggctctcttcagtgacaagccaaactatgaaaacatccagacccacaatccttcctgtgccagtgtcaggctgcccctaaggacagggaagtcctggggagaaagcgttttgcccagatgaacacgtgaactcaacattcgtgtgcatgcttccggtgagttgagaaatctagatgacccgaaaagattttcttgcaaagcaatatccctcaaaaccccattgcataatggcttttgttttaaacctttttgagtaagggatctttttgccgagtggctaggcgttctccaaacaaaacccccaaccctcacaggtacagcctgttttgctgtctgctctccaactccctcctgtgacttgaaggaggagatttgatagcccagggtgatgtttcaacctcctgtggccactccacccttaggtgggtgcctagtcatgccagaaaaaaaaaaaaaaaagccgggggaagaaaaagggcaggcgggcctaggtgaagtcatccaatgaaggttactggctgagcggggacaccttctcacaggactggagagagaatgcggggcagctgggcagggctcacttccagccgcctgtcacagtactgggagtaagaggtgacctatttatttttagaagggggcagtgataataacccagctcctagcttcattcaagggaggcaggcgctttggaagtttgtaaacaccaactttctgagtaagggagga

SEQ ID NO: 13848 - DNA, 1067 bp, Homo sapiens
ggtctcagcagtgtcagacaagagactgaattcgccaagtgcatactggcaggccagcccatcctgctgtctcgctgtcggccagcgttttacagccctgcatgggcaccactgatcagagaatctcatacaaaaaccagtggaggccgggcgcagtggctcacgcctgtcatcccagcagtttgggaggccgaggcgggtggatcacttgaggccaggagtttgagaccagcctggccaacatggcgaaaccccgcctctactaaaaatataaaaattagccaggtgtggtggcagacacctgtaatcccagttacttgagaggctgaggcaggagaatagcctgaacccaggaggcagaggttgcagtgagccgagatcgcactactgcactccaacctgggcaacagagtgagactccatctcaaaaaaaaaaacccaaaaaactaatgggccatggcccaaaagcttgcacaccaaggggatagcgcacatggtctctggggatttggggggtcctttgacagtgattgttataccccaccctgccattaggaacactctacccccagtacccaccctcctgagagggcatgggggccctcagtaggctggaggtcctttacaacccagacacctgttggacagagtggaagagacgagtaacagacaagggtccctgtccacgatgggatctgggctgccctttgccctcatggtggacgtgtctgctggggctttgtaccccagtttggtcagacaggacatgggctcacccaccagctatggggtctctccattgctgctcagacgccaggtcccaggttgcagtcctgtgatggcagtacactctctcccggcagatctcccaggtctgccagctgtgccagcagtccccccggctcttctccaaccatgcagcacagctgcacacattgctggtgagtaaccctgtgacaacaccccgggagaatccagaatgttctcagtaagtaagtacctaaccagatccagaacattcccagtgaaggaccccctgacagcaccctaatcagaatccggaatgt

SEQ ID NO: 13849 - DNA, 1059 bp, Homo sapiens
cagaatgtcaaagcttttcctggaatttcacagcagtattttcatggagcagacctttgctcatctcccatctgtttgggcacagcattaatagagaaccatttaacatgtaagtgagagcacgtcactcctctgccccggaatccccagtggcccacttcactaagagtagaagccgcaatcctgacaatgacttacaaagcacagtgtgaccttgtcctctgtttcctctctaaactcatctacttctactcatggagtaccaatttccagttaaaagacatcctgcgtttcaaacttgcgtagagtgtatttcttgtgagaatattctaactatggaatctgagtagtttcgttgacttgtcatttgagttaggtttaattcatcttgagcatttgatttttaatattcttcagggaaagactgattactgttagccattactgcaggcacacttgtttctgtatattagtatttcccacaactagtgaaatgtttcagcaaactctgtcacagtttactgaacaacttttgttgtttattagtacattttcagtgagtatgggaaaatatttgaaattataccattttgactttttagtcattggttcaattttttttctcctttttcttaatatatgaccatttttgttctttgaaagcattttagtcagacactcatttgaggtactactataggtagatattaattataatacattttccacatgaaagcatttttctctggaagtaaaagctatggaaaagaagatctcataggacgtattttataagaaagcttcaagttgctttggcacagagtttcttatttcctcagctatcaaagtaaaagggattaattttatgatatagccctctattcaaggctttaataattttatgaacaagagtttactaataagaggatttttctttctcatttctctcccttttagagtaaaccatataagaagaaatgagcctttcattttgtggtaacaacatttcttcatataatatcaacgatggtgtactacaaaattcctgctttgtggatg

SEQ ID NO: 13850 - DNA, 1049 bp, Homo sapiens
gacaataagatgtgttcaggggctccctgtttttaagagactcttttaaaaaaaaaaaaacctaatgtttttatcttgagtcaatatgattaggtattttggatttacttttaatcttaaaatactgcatttttatagcttctcagagcatgtggatgggatgggattttcgttattttgctgggtcagcttatctttaatatatggactattcctataaaccaaagtctctgacaagtgcacctaatttatattgtattttaactacagtgtaagtttccattaacaaaaccatcctaaagcgttaactgctcataattttaatcagctacagttatgaaaaaggaagaattttgctctaaagattattaataagcttagaaaatcctgcttttacctaacagaatgaagtggggttgaggggcggtagtatgaacagtgattctaactctatggcgtaaattactttgaagagttcattttggaagtaagggaatcccgcttcccttggtgttgaagatctgcatctgattttgaaacgtccagatttagctttcaaggtgcgtgcatgttgaatgatccagaagcaacgaaaactctggggtgagggattgaaaaaatctgaaatcacagttggatttttaaattcaaccatcaaaaatatgtactatcagtttttttttacattgatgtgaaataagcaaattttcatgataattaagctgcaaaatttaaagttatcaagtaaataggtcctctgtgttctgtttcatgtgatggagtgggtttcagtctgtgttcttggagccaaagggttcctcaggggtgcctcaggagtaatggtttaagagaagaggggcaatgagagggagcgagggggaaggcctagttggtatttgagcaggggccttaggctccatatccccaccccctttacccagaacagcccatttttcttatgtatattggaatttcaagtaagctttcatggggtgcagtggggcggggaggaatggatgggataaaaaaagtggagattttgctgcttt

SEQ ID NO: 13851 - DNA, 1045 bp, Homo sapiens
agtggagaatgacgaccctcaggcagccctggaggatgctgtcacaggctggggcaagggccttcaggctaccaactgggagctctgggaacagccctgttgcaaacaggaagtcatggcccggccagagcccagaatgtgggctgagctgggatccacgtgacagctttgaggctcaccgggagcagcctctggacaggagaggtcccatccaggaaacctcgggcatggctgggaagtggggtacttggtgccgggtctgtatgtgtgtgtgactggtgtgtgtgagagagaatgtgtgccctgagtgtcagtgtgagtctgtgtatgtgtgaatattgtctttgtgtgggtgattttctgcatgtgtaatcgtgtccctgcaagtgtgaacaagtggacaagtgtctgggagtggacaagagatctgtgcaccatcaggtgtgtgcatagcgtctgtgcatgtcaagagtgcaaggtgaagtgaagggaccaggcccatgatgccactcatcatcaggagctctaaggccccaggtaagtgccagtgacagataagggtgctgaaggtcactctggagtgggcaggtgggggtagggaaagggcaaggtcatgttctggaggaggggttgtgactacattagggtgtatgagcctagctgggaggtggatggccgggtccactgagaccctggttatcccagaagcctgtgtgggcttggggagcttggagtggggagagggggtgacttctccgaccaggcctttctaccaccctaccctgggtaagggcctggagcaggaagcagcggcaaggacctctggagcagcccatacctgccctggcctgactctgccactggcagcacagtcaacacagcaggttcactcacagcagagggcgaaggccatcatcagctccctttataagggaagggtcacgcgctcggtgtgctgagagtgtcctgcctggtcctctgtgcctggtggggtgggggtgccaggtgtgtccagaggagcccagttggtagtgaggcagccatg

SEQ ID NO: 13852 - DNA, 1044 bp, Homo sapiens
aggggataggctatttcaagcagagggaagcctgtataaaggctcagggaatgccgtggttttatgtggcagcagatgagactggaaatgagtcaggatgagccacagtggaggatgaattaaatgggcaggagtgtggtagaaagacctgttggaggctatgaatgcaatcaaggtgacagacaactggtgcaatgatggtagtggaaatggaggagaggggattgattcaagatgcatttaggaccaagaatcgggagcttgtgaacgtgtgtatgagtactgtagacggagtgggtgtgtcatcagagaagatctgagcatttgggcttgctctcctcagaggccctgcgagtggagttcagcttttcctcatggggcaaatctcactttcgctccagttcctggggctcagagtccctggcccagatgcctcttgccatctcatcttcaccctgcctggcttcccttgcttgttccaggattgtttcataaagagggatgtggttggtctttaaccctatgaatgctggctgaggatgcctgcggaacctgtagtgaagctttcaggggctgctcgggttctggctggtaggtgaacactgtccatcttgccggctgggacacagtgactctgggtagttgtgtaagagaggggcccttggcagacaaacaggttcttctctgttggtgggccagccagcaggtcagtgggaaggttaaaggtcatggggtttgggagaaactgggtgaggagttcagccccatcccccgtaaagctcctgggaagcacttctctactggggcagcccctgataccagggcactcattaaccctctgggtgccagggaaagggcaggaggtgagtgctgggaggcagctgaggtcaacttcttttgaacttccacgtggtatttactcagagcaattggtgccagaggctcagggccctggagtataaagcagaatgtctgctctctgtgcccagacgtgagcaggtgagcagctggggcagagggatgggggtcacagtcctaagggag

SEQ ID NO: 13853 - DNA, 1033 bp, Homo sapiens
gcactctggaagaatgactctggagtccatcatggcgtgctgcctgagcgaggaggccaaggaagcccggcggatcaacgacgagatcgagcggcagctccgcagggacaagcgggatgcccgccgggagctcaagctgctgctgctccggacaggagagagtggcaagagtacctttatcaagcagctgagaatcatccatgggtcaggatactctgatgaagataaaaggggcttcaccaagctggtgtatcggaacatcttcacggccatgcaggccatgatcagagccatagactcactcaagatcccatacaagtatgagcacatacaagtatgagctcatgcacaattagttcgagaagttgatgtggagaaggggtctgcttttgagaatccatatgtagatgcaataaagagtttatggaatgatcctggaatccaggaatgctatgatagacgacgagaatatcaattatctgactctaccaaatactatcttaatgacttggaccacgtagctgaccctggctacgcaacaagatgtgcttagagttcgagtccccaccacagggatcgtcgaatacccctttgacttacaaagtgtcattttcagaatgttcgatgtagggggccaaaggtcagagagaagaaaatggatacactgctttgaaaatgtcacctctatcatgtttctagtagcgcttagtgaatatgatcgagttctcgtggagtcagacaatgagaaccgaatggaggaaagcaaggctctctttagtacaattatcacgtatccctggttccagaactcctcggttattctgttgttaaacaagaaagatcttccagaggagaaaatcatgtattcccatctagtcgactacttcccagaatatgatggaccccagagagatgcccaggcagcccgagaattcattctgaagatgttcgtggacctgaacccagtgaccaaattatctactcccacttcacatgcgccacagacaccgagaatatccgctttgtgtttgct

SEQ ID NO: 13854 - DNA, 1030 bp, Homo sapiens
gccactctgtctctctcaacctcacgccccaacgcctccccacagggctggggaaagaggccttgtgaggtcaaaggtcaccagagagggcccagcctgctggacacagccagacctgctcttcctactcccctctgggaggacccgcctgagcctcatgcagtgaggactgcagtggctccccaggcccctgtagctgcccctcagccccaggggctgaagggaattggagtcactgccaaaatgggtttgtatttcaggtaatcagagcccagttgatcgaataccttcagagaataagcacctgtactcctgggtctggcggaggaggggctggggaactggactcctgggtctgagggaggaggggtggggcctgtactcctggatgtaagggaggagggtctgaggcctggactccagggtctgagggaggaggggctgggggcccagacttcgggtctgagggaggaggcagctagagtctggactcttacttaggtctgagggaggcgggcctggggtctgcacccctgagctctgggggagcaggacctgtcggtccttggtcttctaaggcctgtcagcacttgggtacccggaggccttcacttacctgtgtgccttccctggttgttttcttgtctgagctgatctccaggctgcgaccaaaggtctctggggtgggaggcgcttgcgtttgactttgccgcagcatggaggagggggcgggagctgactcagctctttccagcgagccctcgtcagggcagggaggggacttggcctccttcaggaccacctgccccgtctagaatggactgaaactgggacagaacaggcaggccagtgggacctccaagtgcaggaggtggcgagcgagctgccagggcccctgctgtgccccactcaccccctctctcacttctttctccacccagatctgggcacgaaagcttctctctgtcccttggcttctgtgtggtcccagaagatatgcctcctccagtttcaaggtgaaaggagggaa

SEQ ID NO: 13855 - DNA, 1009 bp, Homo sapiens
tctgctcaccgagtctaagatccagcggacaccagggctgcaggccgctaccaaggccccgcaacgccaccatgatcccagggcaccggctcgccgccgccgtgctcaactttcaaagctcgctcccgcgcgcgcgccgagtcgttcctgtggaccaatcacaacgtacagaatttcccactggccaaccaccgcgccgagccgtttccattcgctcaaccaatcaccggcgtcgtccgccgcacgctcagagaactgggcgggccgaaaagtggaagccaaacaaggctcctgcgggtgttccgctaattcgttcgagaaggagccagggcctgagttaaaccctaacagcgtttttcccgcctcgtttttcttcaatgggggaaaatctaaagggtatctgagatagggtacttccggtagtaactgtcacctttgccctcgtcaggcgacatttcgcgtgcgtgtcaaagggctgcctttcccgtcagcactcgaacagcgtaatatccgaatgtgaaaggcagcccaacgtgtatcgagctaaagtaataagggaaaagtagccgaaagcactccgagaagacaagacaactgcagttctgtagggactgcgcggcacgcgtgggcccagagcctgtcccagcgaggtagcagctgccatgccgaccgctggagcgccggccgcgctctccctgcgcatgcgcagcgagctctcctccgggctgccgggagtcccaggagcgttagggggtgcgcctgcgcgccgctgctccagcgcatccgggctggagctcgcccgccccctcccccgcccggagccgccgaagcgcctcggtgcgttgcaccgccggaggctgggcagctcgcagcgctgctcggcgctggaccccacccggcaggcgcaggccacccacacccggctctgtgcggctgccccccgcagcattgcacggccgaccctcgcccgcccactgccaccggccgcgggactggctgggactggctc

SEQ ID NO: 13856 - DNA, 1002 bp, Homo sapiens
ttctcacctctgagttttccctgtacctgggatatgggcttccttctgaactccattattcatgttatgcagagtaattctctttggtaaatccatccatgacaaagttcagtactttacatttgcatttcttcattctacaacttgcaggctgctataatttgtttcctcattccaaatctctttatgtgactttagcttcaaataggatttgcctcctttgaaaatcactggtgaagcaggtatgaatcttactccaaacccctgtgtaagagataaactggacattctcaagtactaccgagtttctgtttctaaggtccatcctgctgattttccatcctgggaacgtaatcacagtggcttaaagattgtactcacctctgatgcctggccctgcctcatccccaaaaacccagttctgcatttcatttgaatctagcacagtgccaaggctaggggtggatgctcactgtgttctctattttgacctcccaagagagactaaaagacttgcccaagtgacagagaggtgagattggaactgagaaagcctgtatctgaagcttctgcttttacccactgctctatagtgtctctgtatcagtttgaacaaatgactctctgataacctccccccattaccaaacagggttggggtttatcaggtaggttagttagttaatggcacaaaaggatgctctatgatcttggtatatcaggatattttacctgtgagaccactcaggtttcttctgaagaaagatctgggccagagggtaaacagtaacagcttggcactccctctctttccttgagtcccagggcctgattggttcagcaccaagtgaagtcatagtcactatggtgactcacaattgtcctcagaacctagtgccaacagtctgcaagattcaaacactggccaccatgcctggcttccttctggttcaagcctgaataaggtgagtggaagttgctgggagaggaggtgggtatatc

SEQ ID NO: 13857 - DNA, 998 bp, Homo sapiens
attttcatccctccaactccaactccttcgggcctgagccagcgcctcagatggggcttcgcctggtctaggagggtccgcaggcccccgagtctctgggagaacagcctccggccacgccgtgcgctctcggtcgcagacacaggcgtccctgggtcccgcaggatcctgccaccagcccgcgggccccgctggcggaccacgggcgctaggcgtggactgtccgggcggaggaggcgccccggggcaactggagaacaactttgggggtctggggttccaaggagaagtttgggaacagtcggcgttatgcggacttttgcaggctgggatggggtttccgggcaggtttgggggaaaaaggaaggggcctaagaccgcgcgcggaaagatgccgttatttggaggcgccgaagcgggcggagccagccagcaggacttcgcgccgccgccgggccagagcgctgaggatcggcgttgccagggacaacgcgttctgggcggagctgctgctggggcggacctgagtctgaagaggtgggggcggagcctggggggctgagccagaagcggagttgtgattggtgaagaccacatgctcggggtggggcctgggctggggcggtgtggaggttggggcggagctctggggggcggggcggggcgggggagggcccggagcgccggagccggaggcggagacgtggttggcggggactgtgcgccctgggaggggtcggagtcggcgggggcggagccgagcgggcggggagggtgctgggtcgcgcctggcctggggccgaggcggcgcgcggcgctgacagctgagtcggctcgcggcctcccggccccctcggcgcccggcccgaccctggcctggcctgccctgccccggagccatgagccccgggctgctgctgctcggcagcgccgtcctgctcgccttcggcctctgctgcaccttcgtgcaccgcgctcgcagccgctacgagcacatc

SEQ ID NO: 13858 - DNA, 993 bp, Homo sapiens
tgcctcaaatgtaagaccacagatcttgggggatagctgtaaaagaaggctggtagatgccattgccagtcaccaattggcacaatagcataggggcagaagactagaggaggaaatccagagaactttggtgggtggaggcgggcacaaatgcaaaggacacatggaaagaaattattttgacttacttttccaggtagaagatttcgtggatcccaatggcaagatctctctacagcgggaagagacaccatcaaaccggtaagagcagaccagaggctcaggggcttggggagggagagtcagaactttggggctcaccaggccatgtgccctttttctacagaggagagtcaacagtgctgagctttgtgagctggctaacactgagtggtcctgagcagtctagtgttcggggcccatccactgaaaaccaagaggccaagagagtggccttagagtgtataaaggtaactgcccatccacccctggtgagaaagcctaaacaccttcctattagatgctacttggtgaactgaagaataaatcatccaggatttgtaaccagggctgactctgccctctccccctggctcttggggacattctgttctcttcagcctttgtcaaagaccccctctctcttttgccctctctagcaatgtgacccagaaaaaatgatcacagaaagcaagttcctccagctggagtcactacaggagctcatgaaggtaaaggatgaagaaaggaaacatggaacaactggctgaatctgggaggggtgacagggacagtattatttctgtcagggcagggccagtggttggcttcttttccatgcctactttcctgctgctgttccccttcaggctctggtctcagtgacaccagatgaagagacatatgatgaggaagatgctgctttctgcctagagatgctgctaaggattgtgttggagaacaggtaagatgagcgtagtctttaggcagacc

SEQ ID NO: 13859 - DNA, 985 bp, Homo sapiens
gctggttattagcatttgcttggacttagcttagcaaatcatttgttctcactaaatgaggttgtagagaattcctaggtctgtttagctaatatttggtaaataatataatacaaactatttttttcagtaattttccattaatactctaatgtagagtaatacacttgagatgggcaaaacacttctgagttatcacgtagcctgggcttattgcactccatgtacctaatctattgttctggtattatttacataactaaaattttggttctgatatttaccaaaattgaggaaaatgtaaattgtatgccatatgaaattaggttttatgttacacctatgttcacctactaatacatttagtatctgtaccaatccatttgccatggcacaatcattctagcatgggacataccttcattttcaatacagaagcttatgtagaaatattgcatcttctgagcattctgtataatatgtgctttggtagatactgtcaataaagagacttctttttatctctttttttttagtttgctggaaaccatgtctcattatacagatgaacccagatttaccatagagcagatagatctgcttcagcgacttcggcgtactggaatgactaaacatgaaattctccatgccttggaaactttggaccgtcttgatcaagagcatagtgacaagtttggaagaaggtccagctatggaggaagttcatatgggaatagtactaacaatgtcccagcatcttcctctacagctacagcttccacacagacgcagcattcgggaatgtccccgtcacctagcaacagttatgatacttccccacagccttgcactaccaatcaaaatgggagggagaataatgagcgattatctacatccaatggaaagatgtcaccaactcgctaccatgcaaacagcatgggtcagaggtcatacagttttgaagcctcagaagaggacctagatg

SEQ ID NO: 13860 - DNA, 983 bp, Homo sapiens
gcagtagtgggtcagggagggcaccggaacagcgcgacccgacagcccgggaaacggacagccgtgtcagaagggcaggtgccagtgggcaggaggccggagagaaagccgcagcttccttccacctcgcgccgggcccgcggccgcgcacggggaccgctccgagttcctcccggcgggaaccccccgccccagaactttggtctcgtcccacccacccccgcccgcgccatggtctcgccctagggagccatcgataactctacgctcggcctcgatcgactcgctccggctcccctcgccgtcctggacacggcggagtgcggagccgcccgtaaggtacggaggccgcgagccaggggccgggaaccggctgctgggtggctgggagagcacggccaggggaagccggccagcaggacggagcaagggcggtcaccggaggaaaggggagctcgggggtccagccagactgcgccctttcccatcagggcctgccgctggcctgctacgcatgcgcagccgcagcgctcggctttccccggcccatccgccgccttgcgcacgcgcagcccgcccctgcggcagagtggcgcccgcgcgtgactcccccctgccggctgcggaggtgggggggggacggcgcccccgccgtgtgcgtggggcggggatggagcacgcgccctggagccccggagccaggtatcacgcgtgtgacgcgtgtccctgaacctacctgcgcttcttgtcccaactctaaaatgggaatgataagcgccattcggcagcgccttgtgggtctataatctacttagcacagagagtgtcttctaagtacttcacatccttctctgcagatgctctgacctttgacccctgccgttcagctctagggcccgtgcaggccacaccatgaacacctccccaggcacggtgggcagtgacccggtcatcctggccactgcaggctacgaccacaccgt

SEQ ID NO: 13861 - DNA, 967 bp, Homo sapiens
ctgttgcaaacaagaagccatagcccggccagagcccaggaatgtgggctgggctgggagcagcctctggacaggagtggtcccatccaggaaacctccggcatggctgggaagtggggtacttggtgccgggtctgtatgtgtgtgtgactggtgtgtgtgagagagaatgtgtgctctaagtgtcagtgtgagtctgtgtatgtgtgaatattgtctttgtgtgggtgattttctgcatgtgtaatcgtgtccctgcaagtgtgaacaagtggacaagtgtctgggagtggacaagagatctgtgcaccatcaggtgtgtgcatagcgtctgtgcatgtcaagagtgcaaggtgaagtgaagggaccaggcccatgatgccactcatcatcaggagctctaaggccccaggtaagtgccagtgacagataagggtgctgaaggtcactctggagtgggcaggtgggggtagggaaagggcaaggccatgttctggaggaggggttgtgactacattagggtgtatgagcctagctgggaggtggatggccgggtccactgaaaccctggttatcccagaaggctttgcaggcttcaggagcttggagtggggagagggggtgacttctccgaccaggcccctccaccggcctaccctgggtaagggcctggagcaggaagcaggggcaagaacctctggagcagcccatacccgccctggcctgactctgccactggcagcacagtcaacacagcaggttcactcacagcagagggcaaaggccatcatcagctccctttataagggaagggtcacgcgctcggtgtgctgagagtgtcctgcctggtcctctgtgcctggtggggtgggggtgccaggtgtgtccagaggagcccatttggtagtgaggcaggtatggggctagaagcactggtgcccctggccgtgatagtggccatcttcct

SEQ ID NO: 13862 - DNA, 964 bp, Homo sapiens
gagctcaggagagggagcagattgttgggggaaatggctggtgacagagaatagaaagagcctatatggagaagggtgacgttggaaaagggaggcagtggatcggtattgatgttagaaatgagaggggagggaggtaacagggaatgaacccccacaaggatgaaaaacgtaagatgattgaagttaaaaggacatcaggggtcacctgcccagccctcgcagctgaagcttgaggaagctctgcccccgacagcagtggcgatttgtcaaggtcacacagtgagttaccggcggagaagggacccgaactcccaaacaaactacacctgcaagcgtttggtgtttagactttctccccgatgtataaggtgcaggctgctcgtcgatacttcctcctccaccctcacggtgcacacccgaaaaccccccaattctcccggcaagcaaaggctattttttaatgacatcttttccaaaatatgtcaccaagtacccactcctgcgggagccgcccgggctggggagggcgagtccgagcggggcggggcagaggcggccgaggggcggccggacctctggcgggggtcccggggcgcggcagggggcggggggcgggggcgggcggcggcgaggcggcctgcagggagcagccgcgagccggccgggcgcgccgagcccgagccccagccggagcggggcgggggagggaggagccagagcggccgccgcctctgccggaggagccgcggggccgccacactcgccccccgccccccccgcgctcactcgcactcacacccgggcgcaggaggcgggcggcccgggccccaccggccccccatggacgcccccagcacggggcgctgagacccccgcgtcgctgcccagcccggtccggcgcgccacgccgaggtaaggaggagggagcgagggggcattaatatgcaaatgccttgcgatt

SEQ ID NO: 13863 - DNA, 933 bp, Homo sapiens
cttgccctgtttagccattatgtctctttactcacaacagtttataagtgaaactttgccttaccatttgcatgagtcggcctcagcttgtcattatatataaagcttactaatgtaaatgacgagttaatgggtgcagcacaccaacatggcacatgtatacatatgtaacgaacctgcacgttgtgtacatgtactctagaacttaaagtgtaatacaaaaaaaaaaaagtttaaatatgattggactctaccccagagcccagttttccagaaattagaaacagatatgcctaagacccagagggttatttattactcaaatctaaaacgttgactcaaaacctcccctaatgcccacctttggcaaacgatgcttaaacctttgcacgtggcttcaaaaattacctggctgggaacgcgtagctctggcggggcactctgcctccaagccaaaagggggcagtggactcacagagccgctgctcggccctccgatccctccaccccaccctgggaacgtcacgacctcctctcgccgcttctccccgttgctaatgcgcaggcgctggcgggatagcgcgccgccgagccgagaaagaggtcacgaactctgaccccccagaaatacccaaacacagaaagctctctccgccgtgaatctcgatcccacatcccgtcggctttcttcaacctctcttcccggagcgccccccaatccacgagtggcagccgcgggactgtcgcgtcggcgcccgacgccggagtcagcagggcgcaaaagcgccggtaagaaacgctgggtggggacaccagcgaccgcgtcgggggcgggggccagggggtgcccttcaccccaaccgccaacggacgcggtcccagcgcatcccccggccggcgtcctgcggccagcggagccgttcagtttgggag

SEQ ID NO: 13864 - DNA, 929 bp, Homo sapiens
gtcatgagattcccttcctccttccctggaagagggccatctttgggcagcagccctcccaggccttgagaaatcccggatgaagcacgcactggctcagtatctccctcagcttcccaaacactgttgcctcatggggggtcagcgttcagggtgcagagagccccagagaggtggctggggtggggaggatggggtgtctggtcccagcctggagggaagggggaagccctgggaagcagggcctcctgttctgggggcagggctgggtgtgtgcctggcctcctgatggcagcaggtgctgtaccaccaacctcgggctgaagacagggagaggaattactgtaagggggagaggcaggtgttctctggtcagctggagatctggacttgggaagcacgtgagtgaggatgacagcagtggccaggtgtccctccctcaactcggcccctacatccgcccccagtccagacccagcttcctgagcactcagccctccctctgggtacacagcagccctggtgggcagaattccttgtgtttacctcgttgtctgggtgatggtggtgattgggtggaactcccatgccagatatactgccaaggccaccctgaggggctgccaaccggggccccatgagtgctagagctgctggtcttgtgacgtgggcacctgtctgccaggcctgggcacgggcccagggtcacgctcatgctggggctcccgtcagctgactattttgggctcttgctgacctgggccaaagtcaggtccagtcaagagggcccaaagtggctccccccatccccagaggccggctctggtttctgctatataaacagaggaggacacgccggcttggaggcagcaccacatccagagctcgctcagctgctgcccagcctcggctgtgaggataggctggct

SEQ ID NO: 13865 - DNA, 928 bp, Homo sapiens
ctgtgcttggatctcagagacgggcaccgactgccgagccccagacgaagtgccccagggtcggggatcaggcttgtgcagggtagcacctggggacctgagggacctggaggccttcttgtatcctgaagtaggaccttctaagacttcatgagtcctggcccccttgcaggggttggggagctggggatcccagatctgcctattgcgcccgatgccccgaggctctctcttggactctggccctgagttcttctgcgcgatccttcggagacgtctggaggcctgctttatgcatctctcttggacctcagtttccccacacgtgggaggaggcagctggacgattcctgaaaggactttcccttgcttcctcatcacgtggaagagagcccacccggcacctggaaatggaaagccagtgaaggctgctttgggccggggcagcgggtgggaccgggcgggagggattccaaagagaccgccgggaaggctagagcttggaattccggctcctcggagtcctggccctcccccaccgccgcctcggagctcagcacaccttggatgggggaggcgggcagctcctagccccgcaccccaggaggcgcgctcggagggaagccgccaccgcgccgcctctgcctcggcgcggaacaaacggttaaagattttgggcagcgcctcgcggggggaggagccaggggcccaatccgcaattaaagatgaactttgggtgaactaattgtctgaccaaggtaacgtgggcagcaacctgggccgcctataaagcggcagcgccgtggggtttgaagcgctggcggcggcggcaggtggcgcgggaggtcgcggcgcgccatggggctcccggcgctgctggccagtgcgctctgcaccttcgtgctgccgctgctgctcttcctggctg

SEQ ID NO: 13866 - DNA, 914 bp, Homo sapiens
gaaagctgttgtccaagaggaaatttcccaaaaagccctaaggtctgaagaaattaagatgtcagaggcaaaatctcaagaaaagttagccctcaaagaggaagcttcaaaggttctgatttctgaagaagtcaagaaatcagcagcaacctccctggaaaaatccattgtccatgaggaaatcactaaaacatcacaggcatcagaagaagtcagaactcatgctgagattaaagcattttctactcagatgagcataaacgaaggtcaaagactggttttaaaagccaacattgctggtgccactgatgtgaaatgggtactgaatggcgtagagcttaccaactctgaggagtaccgatatggtgtctcaggcagcgatcagaccctaaccatcaagcaagccagtcacagagatgaaggaatcctcacctgcataagcaaaaccaaggaaggaatcgtcaagtgtcagtatgatttgacactgagcaaagaactctcagatgctccagccttcatctcacagcctagatctcaaaatattaatgaaggacaaaatgttctctttacttgtgaaatcagtggcgagccatcccctgaaatcgaatggtttaaaaacaacctgccagtaagtttaattatgaatatattattgaagaaaaactaaaataccatgtcttccacatctgaagaacttcaacatttcttttctttttcctttgtcttagatttctatttcttcaaatgtcagcataagccgctccagaaatgtatactcccttgaaatccgaaatgcatcagtcagcgacagtggaaagtacacaattaaggccaaaaatttccgtggccagtgttcagctacagcttccttaatggtccttcgtaagtatctcctcacccttcttccttacatg

SEQ ID NO: 13867 - DNA, 900 bp, Homo sapiens
gagggaaacaggagaatgtgatgggaaaatccgagatggagccagcctgggccagaaacactgggagctgtgggagacggagaggggcagggtgggatcacagggagcaggagcggggaattggaggtgaatctggccctcccaaacttccagtccattctgctcccaggggaaccgggaaactgcgggggaactggaagggagctcccagaacaaggatccagaagattggcatctggggcctgggatttaggtttctaaatcgtgggccatggggcagccttatctctgcaaaagcattgagggtagaagtcaatgatttgggaagttattgaattaggggatctcggaggtaggctgtcagtgcctgatagtatcagttagaatgcctgacttggggtgacaatggcttggaggggtgggtgagtcaagggtcaaatgagtgcccgtgagtcatgatgcctgccttgtacaattgataactgaacatcggtgagttagggccccagcagttgtaattagcaccccgggtgtcagccagaaaccaacaaacagccaaatccctgcagccccgcccagcctatccaccggcgggggaccgattaaccattaacccccacccctccccggcagagcctccaccccttcacagaggctaggccaagactcccagcagatcttcccagaggacggtttgaaaggaaggcagagagggcactgggaggaggcagtgggagggcggagggcgggggccttcggggtgggcgcccagggtagggcaggtggccgcggcgtggaggcagggagaatgcgactctccaaaaccctcgtcgacatggacatggccgactacagtgctgcactggacccagcctacaccaccctggaatttgagaatgt

SEQ ID NO: 13868 - DNA, 892 bp, Homo sapiens
ctgtgcccagcctatttttcttttatgagatcttaaaatatgaaaacttttttgtttttacattctaaaatagaaatcttaaagtttaaaaaactgtttgagaaccccaaagaaaaatattgccatacccacatagatgtttgatgtactgtgtttcaaggacgtgtgtatatgtatgtgcaagtatgtatgtgtagaagaactttgctgtctgagaagaattgacatcctgtcttcccccttcttccctatcaatccttaaggaaaaagaaaaaaaaatctgagaagataaaaacagatgcctatgttgagtagaaagggatttttgagagtgattgattttataagtggtcagtttgatagtaaatattttcatattatgatactttttacctccctgtaaaacctcttcactgtgaagactaaagtaaagaattattgggtcaaaggtcagttatataaaatttttaaaagataatttctccattactttttaatagaatcttatctgcctttaagatttctgttcatttgaagatattacttgagcttctgtcctgtcttagcttataggcaacagcagattgcagagctcatattgtcacagttgtttgttacccactctctgtcttttttgtgaacaggtatcatctccaggctctccggcacctctatgtgctggccgcggagcccaggcttctagtgcctgtggatgtggacacaaacacgccctgctatgccctcttagaagttacctacaaggtatctctccctatcatttacttgtaattttattaccactcatccgtctttgcaggtcataatatttcaaatgtgttgtccagtaaaaggtgataagtaatgaattgaactttcataaaaatggaagctt

SEQ ID NO: 13869 - DNA, 838 bp, Homo sapiens
tacacagattgccctcaaagtcatatttccaactgctcatcaatctaaaaatccaaaattttgaataattttttgatgaaataatttatttcattgtttctcaattttggctgcacagtggaaccacctgggctgtttgaaaaaacctaggcctagccaggcacggtggctcatgcctgtaatcccagcacttagggagaccagcctggccaacatggtgaaaccctgtctctgctaaaaatacaaaatcacctgggcgtagttgtgcattcctgtaatcccagccacgccagaagctgaggcagaatcgttcgaatccaggaagtggaggctgcagtgagttgagatcttgccattgcactccagcctgggcaacaagagcgaaactccatctcaaggaaaaacaacaacaacaacaacaaaatcctgggctctgcttcagactagttaaaccagaatctccagggtggggcaccggaaagaacaagaaaaaagaacaccttatttttatcttcttcagtgagccaatgttcattcaaaagagagattaaagtgctttttgctgactagtcacagtcagagtcagaatcacaggtggattagtagggagtgttataaaagccttgaagtgaaagcccgcagttgtcttactaagaagagaagccttcaatggatccagctgtggctctggtgctctgtctctcctgtttgtttctcctttcactctggaggcagagctctggaagagggaggctcccgtctggccccactcctctcccgattattggaaatatcctgcagttagatgttaaggacatgagcaaatccttaaccaatg

SEQ ID NO: 13870 - DNA, 811 bp, Homo sapiens
tttgtcttacatggtggtaggcatgtcttacatggtggtagggaagacagaatgagagccaagcaaaaggggaaaccccttataaaaccatcagatcttgtgagacttactcactaccacgagaacagtgtgggggaaaccaaccccatgattcaattatctcctacaggatccgtcccacaacacgtggggattatgggagctacaattcaagatgagatttgggttgggacacagccaaaccatatcaagcattatgctttaaattcttccattttaaatcataccattccattttaaatcataccattctgccaccttttgatggggacaaatgtcaggacccggagcatggcacttgacctccaagtccagttttagagccagtgaacagaaacccaccctctaaaagttcttaaactggaaaagtactcccccaaaatgtttatctaagagactggtttccagcttactaggcaatttggcattaagaactttcctcataaacatttacaaatattctgctccgtaatgaagttaatcagtaaaccacacaacctctgtcctctctcactccttacctagtctcattttcagtggctgtgaataagctaagaatggtaatgcagtttcaggggttagaaaatccaattcaaattagtcctcactgcagctgtacgccgtcaggatttttcatggaaatgatgagtatgaagcccgcgaaaggtaggacactgttcacaggtgctttcaggtcgagctcttgcaactggactgaggaaatctggggactttggttggagatgacagt

SEQ ID NO: 13871 - DNA, 806 bp, Homo sapiens
gctagcaatatatgtgttagctttagtgtctttttaggttcagattatttttggtagaccttaaaaaatgagaagataaaggatatccgaaagaagccttaaggtagatcctttacttggaagtatcaggctcttccacctgactccactcataataaaaaatgaaaacaaaagtggttgacgtagcaaagattttaacttttaaagcttgatagagctttgcaggtttaggaagataacttcccagtcttcagattgggatggtgagactgtgtggccccacctccatgcaggccatgcagaacacaggactgtagagaaacagaggctcattctcagttccaacaggaggaagagtgcccactgggcagccagtcctgttagggcaaggagcagcccttctggagacatggcagatcttaacgtttcagtgcatatggatgggggagggtgttctggggctggtggaacgtagagggcattcatggtggtgaaagtgggatgtaggagagggtttgggtgatgatggataactgggttcactgtgtgctaactgagctgaacagagtatgaggcgttggcctacattgtctccctggaaagactgctgtcacaggttctcttgctggcattgtgatgcagggctgcgtgaagccctccttacagcgggaggtgggctctgttggagtgggccctgtgcctctgctgtctcctactgctaacgtgaggcatcagctgaggagggatggggatgaactattttaggcagggggttgcagtataatctgagccatgctatcctatgg

SEQ ID NO: 13872 - DNA, 3352 bp, Homo sapiens
actcctctaggggatacggtgagccttggcccctgcccttgaagggttcagggcagtaggccacggtgctgggctccccacagatctgggcctggggttggtggggcctcgaggggcctaagtctcccacaggctgcaagtcctgagaagcctcagtaaacactaaaacagtaaacagtaccctggccaggcagactgtgtgacctgggccaccactctaaaaataaattccaggaaaacagtatggtcccaggtccagcaatgtctgagattcagggacattccctgccaaccagagccgatttctgtggcctggtgactaagctccctctcgcaggagcgtaagcatggtgggggagcggaggctggggcttgacgtcaggagattgaatccttgctgtgtcctgctggtctaagacacccctctgcctctctctgaggctcagttcccaaatctgtaaaatgggaggaagcaggtcatctgcttggtctacctcgtggtctgagagctaaatgaaattgcaattgtgcagatgaggcgtgatggagggagaccacctggctttggggtcacgcctggatccaaattctagttcagcctcttactagctgtggatgttagtcaacaacttagcctctctgggcctcaggctcctcatctgtgaaatggagctaagagtccctacctcctagggaacagtgcctacacgtggcttgcaatccactaatgggtgttgttattattaggaaatgttcagtgaaactgtatagcatgacaaacatcaagtgtgtcattacagagattatccctatagcaaccaaggccaaacgcctctgcctgactctcagctccctccacccccagtctggccccacctgccttccagccttgccacccaaggcctgacgacagcagcagttgggaggaagatgctgacagctgatccgagggggtggggcccctctcaccactccttggggcggggagccctgctctggagctacctgcccagcccagtgtcaagtcactgccgagccctgtggcagtttcggggaggaaggggcacctggaaaggcagagctgtgctggggaggatccttccctccaagtggggctccatccagcctgcagaccacagcccggagcgggagccgggcagaggagtcaaggagctgggctctgcctctccacctagtgactcctgccctggctgcctctttagaccacagtgagtttaaaggaggttgaaggtgctttttcacctgcctgacttggaactccatgaggggggatgtcatgaccagcataaattagggggaacctaatgacgtctgccccttgttcttttaagcttcaatagaaacactcagtccaagatctgggaagacccttgtgcccatttttaaaagatttcaactctggccattaggagaagtggagagatcaggtgacaatgagttcccagttcaatgctggatttactgctggcatccaacgtgctccactgagcaagcaccagctcctcatgctgcaccactgtgcaagcgagcctcaccctctgcgggggcggggtgggggggcagcattccgctccggcctccgcagcttcgcacgtgccgctgtctccggtggaacaccttttccctcccccatctgactgtgtttcactttttcctcaagactctgaaaggtttcctgactccctcaacgtgggcgaggagctcttttcccctactcccgtcccgctgcctgtccctactcccgttgtagttctgatcacactgatgtcctgcgtgtctaccattctaagccgtgggcttctcaaggcagggcctggattttgtcttaaacagttcagggtccccgggcccttgggcaccagggggacatctcatggtgcaataataagaaacactcacactttacagagggaaggttctatcgctttccctagatcgtggccagccacggtgtcaggtggctgcccacctgcagcagagcttcctggtgctgcgggagggggcaggccaggcctggtggggccagtgaagggggtcatccccttcccacctggcatgaaacgcctgtgttgtgctgcgtcctgagacccctggggaaatgcaccattcattcattcattcattcattcactaaaggtcactggctcctgcctgggatctgggacccagcccctgagcacacccccgcccccactgtcatggtcccgctgtttgtcttctcccttccgacctcccgtggccccagcgcggccagctcacagtaggtgctcgggcagcgtttcttcagggacctagacggcctggagaggaagggccccagcccagccgcccgggcctctcacctggctctcggggcgcccggctcgcacttcctcccgccgccccgccccttccacattcctgccccgccgggcctgccccgcgcagtctgggtctctgcgccgcagccgcccgcccgcccgctcagcgcccggccccgggatgacggcggcccaggccgcgggtgaggaggcgccaccaggcgtgcggtccgtcaaggtggtcctggtgggcgacggcggctgcgggaagacgtcgctgctgatggtcttcgccgatggggccttccccgaggtgagtgccccgcgcctccgcctcgcccggttccgctcgcgcgcccgggtgtacaggtccgtgccggagcggcccaggctgtgcgcctaacccggcctccgaggggtgtcccagcggggcctggggtccagggcagagttcttccgccccagccattgggaatgaaggcctcagtgatgttatctgtaaagccggaggaatggcatccaccggggagaggtgtcacaaggactgagtgaggcgacctgggtgcacacaagatcctaagacagcacttggccacacaattccgctgagggcctgagagcttggaagccagactgccgaggttcaaattatggctttgcctcttatagctgtgtgcccttgggtaagtcccctaaccctgctgtgcctgtgtccctcactacatcacaggtgagtgacagtgcccaccacacagggtcactgtgacagagagttaatagacctcaagcactcagccccggcctgtgcacaggaaggactcacggagagttggcacatgtcgctcctgggaaacattgtctcccttccagctcttgccgctggaaagcacatgccatgggctctgccttggagggtgggagcacgccagctgtagcctcagctgctgggcccgcgtctctgctctcctctgagccccgtgcccttttgtaacctgcttagcttctctgagcctcagtttcctcacaacaac

SEQ ID NO: 13873 - DNA, 3317 bp, Homo sapiens
agacatatctgcaaaggctctggtccacagttcctccagatatcatgcctgcattccttttgtctcctaccccattccattctagcttccatgtgacctctgaaaagagcttgggcaaacgcttacttgaccctgaccttctgtgtggaactttgtatggttcctcactgcccagaagctaaagtacaagtcattgaactttgcattcaaggccttgctcccactcctccaggtggccccttctgcctgcacactcctaacccctctctgggctcccaccttggcctcttggcctccgctcatgctgttccctcctcatcttcgcctggtgcccttcctggtcttttggcatttggcaccctgtctcttctccagggagacttccctgacctccccagccccagtccaggtcaggcgacctctctgggctcctcagccccagtgtttccttgcgggggatacccccggactgagcatgtatcatcgatgaggggtgacctggtggaaagatgtctgaatcaggatcagccttggtctcctcggtctctctcctcactgtggggcgatgttgtgttccacaagtggggtgcagggctggttcatgaacctccttgcaggaagggaagtccctggttatttcctggccctctcccatgcctcctcataaccttgaccacagtcttctctacaccccactcccggaccactggcttgtccatgccccacacctggtcccagacttgccacctgtccctgccctctccccttaggactgtcatatttacctgtcgtgtgtctcagaccttctgatatctgagtcatctaataaacaaactgctaataggacaagatcatgacagacagagactctgtcggcctttcagtggaggctcctttaagtatgcacacttatagagaattttatacacgtagttgaaattgtacatataaacttgcaaattttttctttcttttttgtgggggaggggggagcctgggtctcactctgtcatctagggtggagtgcagtggcacagtcatagctccctgcagcctagatctcctgcgctcaagcaatcctcctgcctcagccgcccaggtagctaggactacaggcacacaccacagcacccagatttctttcttttttttttttttttttgtagaaaataaagaagagaatcttgctatgttgcctagcctgatctttaactcctgggctcaagcaatcctcccttcttagcctcccaaagtgctgagattacaggtgtgagccacattgctcgaccacaacttcagtcatatttgtaatgtacaattcaagtgattttgccacactgaccacactcatgtttaagccacgccaacagagttccatgttttctgatgttttttcgagatggagtctcgctctgtcacccaggctggagtgcaatggcgcgatctcggctcactgcaacctccacctccccggttcaagcgattctcctgcctcagcctcccgagcagctgggattacaacgtctgccaccacgcccggctaatttttgtatctttagtagagacggggtttcgtcatgttggccaggctggtctcaaactcctgacctcaggtgatccgcccgcctggacctcgcaaagtgctgggattacaggcgtgagctaccgtgcccggcctttccatgttttaaagaacatattttgccaccccctggtggacagtggctcaccaccggcacaagaggctacacaggcagatgtcaatggggaccaggcagggacaggtattgtcgtgagcctagccctacccgcgcccccgcgagtaaccacatctcctgactgcccaagcgcagatttccatactgaacatgaaattgcctgacttcgaaatggtggcaaatcattcaaaaaaactttaagctcccgttgtattggttattagggtcgagcctggggaagacccctataggtgtgtgtgtgtccttgtgtgtcgggggtgtggtgttcagacctctaatagggctaggaaccgggcgaccacagcgcggaagcttgagagggaaacccacctggcgccaggcaggagggtcgggggagacagggtgggtccactaccgggttaaagacctgtagtgggtggggctacacgtagggcggagacgatgggacttccggaaatcagccggcacacgtgacttttgtttgcagaagcgggaggtaccctaggcagccaatcggggagcgccgagtctctgtccagccaatgagaagccaggttgctgtggcgcctcgcccctcctccctggtccgcgagccttgggtacccccagcttttcttccgccagagctgtttccgttcctctgcccgccatgccgttcctggagctggacacgaatttgcccgccaaccgagtgcccgcggggctggagaaacgactctgcgccgccgctgcctccatcctgggcaaacctgcggacgtaagcgtgggccgggcagcacggggcgaggggaggttggtgggccaggggtccggccctgtccctgctccgcctccccgacagtgaccccgaatcttttccccagggaccactccccactcctttcctcacgccaagctctgactttccgtgctccacgatcccgcggctccccctccgcacgtctttcccttgtcgccctccccagtcatgacccgggcgtgaccttcagggaccgcggcccgtatcgggatccctgccccgcgaacactgcgcgtttcggctttcgcgcgctcgggtcccgtccccagaggtagcccggccggctccaacttcgggcaaaacttttcatgtccccctcagcgcgtgaacgtgacggtacggccgggcctggccatggcgctgagcgggtccaccgagccctgcgcgcagctgtccatctcctccatcggcgtagtgggcaccgccgaggacaaccgcagccacagcgcccacttctttgagtttctcaccaaggagctagccctgggccaggaccggtgcgtaggggtagtaggggatccatgtgggactgccgcagactggagccactgatcctgcctcagggggaaaaacccatttcttgccctgcccagtaaggacacatcagggtctggagctttggggccccctgaccccttaggttcctgctgttaggaccatcttcaaagtgcgagcaggattgaatgaatttctggctctgctcctcagtgtgtaagtctgtgaaccgggaaggctctcttttaacacccccggggcagtgcaagggtcatgtgggattgtctgtgtgctgtacctgc

SEQ ID NO: 13874 - DNA, 3296 bp, Homo sapiens
aggaagacccaaagacactttccccaccagcccgagaaggccctggaggtctatgatgaggcctatagacagaacccacatgacgcctccctggccagcagaattgggcacgcttatgtgaaggcccaccagtatactgaggtcaggctgggctagggtgtgaaggggcagggagggccagcccagcagggaaggaggaggacggtacatgactggggagctctgggtgggaggagagtggctgacttttcactcagctccttgctgaatggggtgccaaggggagaactcagcaactctctgctgctgaccacacctgcttaagctgagggttacaccctgtgccagctgggaggagtgccttttcactttaggctatgttctggaggggcacactggtgtgatggctgctgaggggaacatggtgtcgggcactgaagggcagaaccaggccagaggctaatatttactgtttgcactaaggcaattgagtattatgaggctgcccagaagattaatggacaggactttctgtgctgcgatctgggcaaactgctcctgaagttaaagaaggtcaataaagcagaaaaagttttgaagcaggcactggaacatgacattggtgaggcagcattgtaacccatttctagcatttggagcagacatactcctcccccattccccattagctgaagtcctgatcccagcgctccccaccaacacagcttcccaggagccagtgaactaacactaatttgagtttccatttaacagtccaagacatcccatccatgatgaatgatgttaagtgcctgcttttgctggcaaaggtttacaagagccataaaaaagaagctgtgatagaaactttgaacaaggtaattgacaggtggactcaagctctttatctgccatctgctgatgggggctgaaggaggaggaaggagagagctccaggtctggaaagccccagacctcttccttaaaaaaggacctaggttacacctctgacatccaccttcacttattttcccgtcctggttcattcagttatggtacactaatgtgctctgagctgtggtgggctgggaaaggcaggaagtaagagagtgcctttgtcctcaagggtgatagtagagataataaggatggtaatgacaatagctcccatgcattgaaagctctgtgctaggttctgtagggtttttgctttcttattgaatgatcacagtagccctttgtaataagcattgtgacattcccatgtagcagataagtctctaggaggttgagaaatgtgcccaaagttgggttcagttgtgttagtctgtattctgttggtgtataccagaatacttgaaactgggtaattcatacattttctacagttctagaggctgagaagttcaaggtggaggagccacatctggtgagatcctttctgctcaggggaaggggaactctctaaagagtgcagtgcagggcatcacatggtgggcggggggtgccgagcatgctaacatgcttgctccggtctctcatcctcttctaatgaagccaccagttccactcccatgataacccattaatccattcatccatgtgtagtttaatccatttatgagggcagatccctcatgatccaatcacctctcaaaggccctaactttcaatactgccacattggggattaagtttccaggaaagctcatgacatttggggggcatgttcaaaccatagcaacgtcatatgttgcttatcagcagggatatgattttgttgtgtgaacatcatagaatgtacttccacacacccagatgatatagctgacttcacacctaggctatctagtgtagcctattgctctgagtctataaacctgcacagcatgttactctactgaatactgtagacagttgtagcatcatggtaagtatttgtgtatttatacacagctaaacatagaaaatgtacagtaaaaatacagtattataatcttaagggaccagcatcgtatatgtggtctgtcattgactgaaatgttatgcagcacgtgactgtaccagcaagtggtggagctgagatctgagccaggtctggcctttcccaacccatgctctttgcacactgggctgcccctgatccgagagcccccggccattcctgtcatatcttcctcacgtttttccccccaggggtgtggcctcaaacttgttcctggagtatgctctgtgcttctagagggagggcccactctctgactgtttgagatgatttatccccttgtttaccactggattcccattcctctttttggccctcggggagccaagtgctgattcctacccatgtcctacagcttaaccctggcatcatcatttcctcttgccctgatgttctctgcttactcacctgatcatttgtgtggtgaatatttgtgggtgcttcctcaaattcccagcagggaggcatacagaacagaacagtctactgtgtgccttggacacctactgtgtgctagttctagcctgtagtgcagtgaagcgaattagacacagaacctcaaggtgtgatggaagcaggtaaacaggctaagtacaaaagcgtgttttgtttgagtcctttgcttctgctcctgcccccagaggcagtgccagcttgcctcatgtgtactcagccagtggctttgcctattcagagtgacccaaatttgcccaagggcacttatgtgtcatttttcatacttctggctttgaattaagaacttaggactttctgtgaactggtatgtcaggctctgagtttctgatcctggcttgattggtttctcgaggccttggacctccagtctcggatactgaagcgagttccactggagcaaccagaaatgattccctcccagaagcaactggcagcctctatctgcatccaatttgcagagcactacctggcagagaaagagtatgacaaggcggtacagtcttataaggatgtcttctcctacttgccaactgacaataaggtgagtggccctcaaagcaagaggctgctttctccctcagggcacaatgacttgctgagctcactgaccaggtacaggggccagtcccttctccattcttccctgaggagtcacagatatgatgggcatgggaggccagctagcagtggcctctggggtaaggtgtctgctcctgctgacctggggcctcacctgctgcagcccttggagcaaggctcaccatggatagccaaatgtgaagggtgtagtggggaagacattgctgaaaatcac

SEQ ID NO: 13875 - DNA, 3262 bp, Homo sapiens
ctgtttcactctcagcttctcccctcgaagggactctctggccacctcctccaccgcagtccagctccctcagtctggcacccactgctacactcagcctcatgagccacttcagaccagccaggtgtcttcccgggccctgccagaccctgctcacattccctctgctggtctgtgctggtctcagaaggccaccgcgcccgcattccactcagccagggtccagctgcagcccccgccacccttccttcccttccctgtcctgggtcatgttgttgccaccctgtgtgacttttgaagctgtaaaatgagcttccagggcttgggtggcgtcggggcagggccgccgaggctgggaggaagcccttctgccttttgctggtgtttctggaatttgctttccctcacctctcacttccttctagaaggagcttcctgactggaaccagagaatgcatgtctgtccacttggtggctgctgggtggggccgggaacaagggcccctgaccctgtgtgctggccgggacctgccaccagccccccagcctgcttcttccccttaagctttgtgcccctggatgcgctaacattcactcttgtttgtccctggactggccatgaagtgaggagatggttatttaaagagaattccctatttatttgacaaaaaatccagttaatatattaatgtgaaataaaccctgtttgcacctcgatttgtttgctgaaaatgtgaaatagtaaaaatgaaataactggaccctttctggctctgcgtgtggtgacccgggggtctcttccggaaggagagccgtctggccgctgagggccctggagacttctgggacggttccctcccatgggaggatccccattctcacggcccagccagcctgtctggtccccaagacagctctggcctctggagctggttcttaacggttgtcgctcagcagctgtgtccctcccccactgagtccccagggcctggctgggacagaggtggatgtggcccagagttggccttgaagggaggagttggggctgccaccttgtcccctgctggctcctcgaggaatggcagccctggcctaagtcctggttgctggagggaggaggccgagtcagccctggagcacgtcaggacctgtgacagggacactgaggtagccaagccggcttgccaccacccacgtcacgtgccctgctgtgaacttgaagggacaggagggtgggaaatggccaaaggccgtgaccaggcccacacgcccgcaagtcccccagcccagcactgggcacagggtgggcaggccacagagctctaggaaagccccatgctgaggcgcattttcctgtcccccgggagccaagtctgtcctcaggagagatcgggcagcagcccctctgcctcctcctcctggccagcctggcccagagctctctgggacttggctaagcccccttcaagggtgtctgaagggagcactgtcctgactgccaaggtgggggcaggggcacagggctgtccctgcccagcacagcttggccccgtcatctccaaggaatgtcacctgtggggccaggcaggctgagcaactggctgtcctccagggagacgcctcttgggagcccccaccctgggcgccaccacaccccaccccaccccgccccgccccacgtctggacgcactcgaggaagtggggtgagaacccccccgggcccaggtcagcttctctcagggttcagcccagcctgggcacagcacatggatggggcaggatgctgcccgcctgttctgggcccccccgccccctgctgagagcgttgtccccttcccagggcctctgtaggagggtggggcggggccaggcctgcccacggggtccaccttctgctccagccagaggagggtcctgtagggatcccagctggggaaggtgcagggggcctgggagactgcctctccgaagcggtgaaaccctcacccttccgtccctcccagccaccctccctaaaacttcccctgacagagggtggcagccccaggctctttgcataatcctgtggcttcgctgtcttcacccagcaccagcggacagggaagggcagagaaggccaccatggcgacactcctctcccatccgcagcagcgccctcccttcttgcgccaggccatcaagataaggcgccgcagagtcagagatctacaggatcccccgccccaaatggccccggaggtaggagtgacctcactggggagagagctggccttggggagcactgtggtctcgggtacgggtgccctgctgtctggccccacctctcgaaggctgggactggggaccagcgaccctcccctgcctactccaccctggggagagccccctgggccagcagagcaggggctgccagatggactctgggccactgtgggcctcaggccctgtggtctgaggctctcagaacccctccctcccggttggcctgaccccatcccctactcctccagcttcagaagagccgactccattaggtgggggtgtccctgctgtggggtgagctgttcggggagcagcagacccccaggccgacgtggcacccccctcacctccgctgccgagcctcacttccgctgctgggtgaggagcagccgccactgataagcagagctgtttcctctggggaagggagggaggtggggtgcgggtgcggagggctcgcgctgctgggcacccatggacctcagccacggcgggcccagggacggacctccaggaggcctgctgggggaacaggtgcggggcatcactggggctggaggccggggtgctggggcccccatacccttggcctggatcaggcctcagaggagccattcctgtccatctgagcctgctctgggcctcccgggacactgcctttccaccttgctctgcagatccagcctccatcccaccacttctcccccgagcaggtaagagtcagagtgctggggtgcagagaggtggggagggcggctgtgtgtcctcctgccggccgacgctgatggcagcaagcaacttgcggtggggaggggactcctgggtctcaactccctccgctgcacaagccgcccttgtcctgcccatggcgagaggtgttggtgccaggggtggctggtggggtccccaaggtgaccccgtgtgtcttagcgggccctgctctacgaggacgcactctacactgtcttgcaccgcctgggtcatcctgagcccaaccat

SEQ ID NO: 13876 - DNA, 3249 bp, Homo sapiens
agcatcaagggtcaagctgttagtctggttctgctcagaatttacccagggtcacaatgcctggataaggccactttgcttccagatgacatttttcaatacaaacacacaaccagaatttgaaatttactataaaaagagccatattctgaaattggttttctagtttacttggcatcttatttgttttaatttggaacaggaaatagcagaatttccccccatgttccgcattttgaattctgtatgcgataataaataatcatataaattataaaataataatgacaaagcaaataggaaattggtaaagagttagatgggggattttctaatgtatttaaagtaagggccacatcccttctatgctcctggatgcccattttgtaataaattgtgaaatgtatccatcagtttctaagttgtagttaaaagctcctcaaacaatgcacagcacacagaataatcttaattaatatttaattaactaaatgttacttgtttgcgtgcttgcacacttgcttggatgagtgactcctttaaattgatctcttgcttctttttgaaagattttagaacttcctgtctatgattcctggaaacggacaccactcagtaggtttcatggaaaggaatctggcatctcccagccatacttatgtacagagtttgtgctgcagcctggaaaatagctgtaactgtgtcaagcaaggatcaaaatcctggtctggaggagctcaagctgaaaacacaaaggcttaaaaggataggcacttcttactgaaattactcccataggcaccttctagcttcaatttagactgaaatgtaaaaagacattaacaatttcttatatttccctcttttccaaattcaaaatcccttggagcaggaaaagggcaattatggctaattatgactattactccaattctatgctcctgttagcaatcagatttgcattactggagaaaaaaaatattatcctaaataaaacattctgactatgattgcttaggagccaatccgaaaatgattaagtttaaattacaagggatcttttttgagggggggaggagagttgataaaaaaaccttttagaaagggaatctacacactactaaaaccaaacaaacacaagggggcaggaagagctcaagctctgacttcaaaacctgttggctgaaatgagagctaaactattttagtgtgccctccggatatttatcaattttcgtggcatgcaaagaaatgtgatgctgacaagtagatttagtttgtgcttggtctaattactgcgaagagaacaggaacgtctctaatgacagctaccctaacagagtcggatttgggagcgcctggggccacattccctagaatttattctttggtgcaagactagcaattctgatcagactgcatttctcacgcattccaaatgccctttttcccttttactctgtgaacctcggttgcaaaggaggggcttgttaaaaactcaccaatcggaggactgtgcccattgtaattcacgaggagaaggcagcgtctgggcgcgccgaagggggctgggctggagtgcaacctgctctagctatggcttttaattccagctgtccttttgcaaatatgccccagaatttcttctcaaacgctctgggtttcgcttcaaactcaaaaagcattgcgtctaactttcccctgggtttgcaagtttccttgggaaatggccatgccctgcgcgggatttcattgactagggcggaggggtgggggtggctaaaatgggtaaccctcggtcgccggcagatgaagtgaacccagcacagcagtgtgttccggctcctctgcaggagtaccagatctattaatagcagcccagagagtagcgcaagcaggggtgggcaactcctggccacttcttccctcacttccaggacaacctgttgcgcctctatctcctcccctccccgcagtttccccgccttggcctctaagagctgattggcagaaattactacccaaccctcagctccgcacctcctcccccgaccaacgattggccacctgggaggactggagtaaggggtgcgagcggagggatttccctcaaagcccagggtccggggacctggaaagtagaagtggagggattcaattctccgcgcgattgaggcgctagcggcggagctggacggcctgggaaggcttcggctcctcggctgcggctccagcccggacggcgccgcgcaactttgccatccttctggcccagccccggctacaggaggaccccgcgggcaacgcgcggagttcctggcacttcccggcggtgtctcttgttgtctgcccggggaccgacttcgcatgctctcaggctgacctgtccaagcccgaacaccgggaccatgcactcagccgggactcccgggttatcctcgcgccggacaggcaactccaccagctttcaaccaggaccgccaccgccgccccggctgctgctgctgctgctgcttctcctgtcactggtaagccgcgtcccggcacagcccgctgccttcggcagggcgttgctgtcccctggtctcgcgggggctgcaggggtccctgctgaggaggccatagtgctggcgaaccgcggactccgggtgcctttcggccgtgaagtctggctggatcccctgcatgacctggtgttgcaggtgcagcccggggaccgctgcgcggtttcggtactagacaacgacgcactggcccagcgaccgggccgcctgagtcccaagcgcttcccgtgcgactttggccctggcgaggtgcgctactctcacctgggcgcgcgcagcccgtctcgggaccgcgtccggctgcagctgcgctatgacgcgcccggaggggcagtagtgctaccactggtactggaggtggaggtggtcttcacccagctggaggttgtgactcggaacttgcctctggtcgtggaagagctgctggggaccagcaatgccctggacgcgcggagcctggagttcgccttccagcccgagacagaggagtgccgcgtgggcatcctgtccggcttgggcgcgctgcctcgctatggagaactcctccactacccgcaggtccctggaggagccagagagggaggcgccccggagactctcctgatggactgcaaagctttccaggaactaggcgtgcgctatcgccacacagccgccagtcgctcaccaaacagggactggatac

SEQ ID NO: 13877 - DNA, 3114 bp, Homo sapiens
cagcctgggcaatatatcaagacctcatctctacaaaaaatacaaaaaccaaaatagccgggcatggtgggtgtgcctctggtcccagctactcgggaggctgaggtgggaggattgctcaagcccagaaggcggtggaggttacagtgagctgagatcatgccactgcaccacagcctgggtgacagagcaagaccctgtctcaaataaataaataaaaataaaaaataagaataaaaatcaataaatacactactgcacttatgcagatgaacttcacttcttccgacttagccacacacaactttccagcatcacagatctttgcagagggtgggacagccgggaaggtgctgttcgcacagaattggctgaatgaccaggtgtttgatggatgaatcccaggtagccagggcgtctctgggcacacgcacccaggatcacacctggacaagaaagtggggtctaaagtagcagtccgaggctgggtgcagtggctcatgcctgtaatcccaaaactatgggaggttgaggcaggagggttgcttgagaccaagagttgaagatcagcctgggcaacatagcaagaccccatctctacaaaattttgaaaaattagctaggtgtggtggcatatgccagtggtcccagctactcagaaggttgaggcaggaggatcacttgagcctaggagttaaaggctgcagtgggccatgatcacgccactgcactctattttgagtgacagagatcctgtctccaaaaaatacatatgccagtgcaggcctggtatgtgtcctgagagttccctgcctggcatctcttgaagtgggcaccagtaaccagaagctgaagtcctggtttggcaaaggatggaggaaaaagatattggatctggagggctgggtgcaggtggcttacacctgtaatcccagcacttggggaggccgaggtgggcagatcatgtggtcaggagatcgagaggatcctggctcatacggtgaaactccgtctctacaaaaaatacaaaaaattagccggatgagggcgggcgcctgtagtcccagctactcggaaggctgaggcaggagaatggcgtgaacccgggaggcgtagcttgcagccagccgagatcgagccactgcactgcagcctgggcgacagagcaagactccatctcaaaaaaaaagatattggatctggaatggatcgctgaaaataaaagaaaactggggtgaaaaagaagtgtacatgggataaactggaggtaatgagttatgtttgggggaagatagaaaaagttagactctgtggcgtgggaggagcagagtaaatgtcaacagtcccctcgagcctggaaaactccaccatgagtcatggaggacccacgtcagaaaatagctattttgagcccagctagaaagtttggctctgtctgcttttcctgagagtggtgagtggttgacccaggctgtaagctcttcaggtcattgcttccccaaacaaaatttcaatcaagcgagtgccatgaccctgcacagaagtccagaactaaacctcgatgtgggactgggcttgccaaaccagaaggtctgttctaagagaaagaagctggaacctgcgaggggaattttgccaatgggaggaacagcaatttctccaaaaagagggggtaggaacagcaatttcccgttcctggaaggtcccctatacattttgttcagagcatttagattctaaatgtcacagtgtgatgtcctcatgtgcaatggacatttgttgatttgcctcccagtatccattcacctttcttaggtaataggacctgtttcctttggggaaccaactggcaccaccgctcccaggacttgcaaatttaatggggcttaccctacccaggtgtggcctaaggtgctcactgtgttcccttcccgttcagattcagatagatataggatcagatacacaccagaagtagtcagacccagaactttgctgtgaacccccctgggggaaaagaaaccctgaatcctaagaacaaagccctcatggaggggataaaagctgagggataaacagatagactttggactcctgcctcaaccacccctagagtgtagaaaccccggttagtacattcctttttttttttttttttttttgcatatgcagtttgggttgagttttctgttgcacaaaaccaagaaagtcacacaaatactatatatctttgttttttttttttttgagacggagtctcgctctgttgcccaggctggagtgcagtggcgcgatctcggttcacgccattctcctgcctcagcctccggggtacctgggaccacagacacccaccaccacgcccagctaatttttgtattttttttttttttttagtagagatggggtttcactgtgttagccaggacggtcttgctctcctgacctcgtgatccacccgcctcggcctcccaaagtgctgggattacagatgtgggccaccgcgcccagccccacaaatactatgtatcttttaagagaaacgcatgatgagaagcagcagggggtcaacatgcatctggggtgttagaacccaagaggcagtagacagtcatcttgtacctcccctgcctgctgtcagaatgctaatgcactgtctcctaaagcagggtatgaaaaatatggccccaaggccatctccagcccatcacttctttttgtgcagcctgtgagacaagaatggcttttacatttgtgaatatttggacggggggcaaggggtcagcgtggaatcaaatgaaaactgcaaaaaattcagatttcagcatctataaataaagctttattagaacacatccatgcccatttgtttaggtactgttgatgactgcttttgtgttacagcagggctgagtagctgggacagagaccatactgtcagaagcgtttgaaccagaacaacaccatcttgaataggggctgggtaaaatgaggcggagacctattgggctgcattcccaggaggttaggcattctaagtcacaggatgagctaggaggacggcacaagatacaggtcacaaagacctgaccgataaaacaggttgcggtaaag

SEQ ID NO: 13878 - DNA, 3003 bp, Homo sapiens
gtaaccttcaggccccataaaaccaatatccacctccagaaattcttgtcactgttttaaaaatgaggaaactgaggcacagaaagagaaagtgatttgcccaaggtcactcagctaagtgaagcaggatttgaacccagccagtctgactccagagtctgcttcaaggggacactgtgagaattcagtgagatttaaaaacatgaaaggaactttataaatttaaggattaagactaataatcaaatgaaagaggtgtgcctgtttgtccactggtgctcagctccacagaggaaaggggcagaaaaatcctcctaccgtatgccagaaaccacttggaatttaacaaccaggacctcattttgtccccatggcagccctacagccaggcattattgtcccagggaggcttatcgaggttcaaggatcaacccaagtcacataaccaaaaagtgatggattctggagcagatgccagggctagtgatgccagagcctctctctccccatccagggcaccaggctgcccaacagcatgcagcagaaggcttgccacactggactggccaaggtccaggaacatgacacaaccaagggcctctccaccttctctcatcccctgtgctccaccatctgagaaagatgcccgggacagaggagccacgtggcagcagagcaacacttctgcccagatcacaagtgggcaacgtctgcaaagcaggcagcagcaaggtgggggcagctagccacaagctctgagaatctcaggctctggctgtgcaattgggccagtgggtccagggaaacaaacaaggactttggagtcaggcaagatctgggctttgtcttcctggtgggatgaccttgggcaagtcactttagcttttttagtctcataaagtaagaatctagccttaggaagaggctgccaatattagagtgggaagtgcctgacacataataagtgcttagagaatggcaaccatatatatacatatatatatatatatatgtatgtatgtatgtgtatatatatatacacatatacatataaatatacatatacatatacatatacatatacatatacatatatatttttttgagacaggatcttgctctgttgcccaggctggagagcagtggcatgatctcagctcactgtaacctctgcctcccagtttcgagtgattcttttgccttagcctctagagtagctgggactacaggcacatgccaccatgcccggctaatttttgtatttttagtagagacgggattttgccatgttggccaggctggtcttgaactcctgacctcaaatgatcccccttcctcagcctcccaaagtgctgggattacaggcatgagccaccgtgcccggctggcaactatcttttattataattctgtgagttcttctcagcagacctggcctttcaggagtggtaggaatcaggctggggataaggattctgaaggaccttattcctgcagggggcccagaactggaatcagaggaggaggcctcctagattggacagtgggcaaagtcctcccagcccccagggtcctggctcccttccctgtagcctgcttctggctgacaacagaagcagggccccaaggttaggcaaacaagctagtgataaggcacttccaggttgggccttgcattcaaggcccacccagctctggggctggcttcctggcttagcaaaagccctagtcttttgtgcacacaagagcgggcaccaatggggacacctgctgattgtgcacctggggccttggtgccctggtacagcctgagttaatgaccttgtttatccacttgagtcatctgataaggggcagctgagtgagcggcaggtggccctgtgccctgcaccggccacttcattgactgaggtgatatcagtgccacgtggggttcccaatgccccctcccccaccacttccccaccattcctgccaggggcaatgtctgtgtgtttttttcaatgaacatgacttctggagtcaaggttgttgggccattccccccgttccactcactgggaatataaatagcacccacagcgcagaacacagagccagagagctggaagtgagagcagatccctaaccatgagcaccagccaaccaggggcctgcccatgccagggagctgcaagccgccccgccattctctacgcacttctgagctccagcctcaaggctgtcccccgaccccgtagccgctgcctatgtaggcagcaccggcccgtccagctatgtgcacctcatcgcacctgccgggaggccttggatgttctggccaagacagtggccttcctcaggaacctgccatccttctggcagctgcctccccaggaccagcggcggctgctgcagggttgctggggccccctcttcctgcttgggttggcccaagatgctgtgacctttgaggtggctgaggccccggtgcccagcatactcaagaagattctgctggaggagcccagcagcagtggaggcagtggccaactgccagacagaccccagccctccctggctgcggtgcagtggcttcaatgctgtctggagtccttctggagcctggagcttagccccaaggaatatgcctgcctgaaagggaccatcctcttcaaccccggtgagctcccagacactcctgggtggggggcaaggctgaagcaggggccagccagggaaggtagcttctaagggtttgatatctgttatctcattgggtcctcattttctttttatttttctgagacagagtctcactctgtcacccagtctggagtgcagtggtgcgatcttggctcactgcaacctctgcctcctgggttcaagcaattttctctgcctcagcctcccgagtagctgggattacagatggccgccaccactcccggctaatttttgtactttttagtagagatgggctttcaccatgttgatcaagctggtcttgaactcctaacccct

SEQ ID NO: 13879 - DNA, 3000 bp, Homo sapiens
ctcagtgcccatattcttgctctccctctagttgaaatatccccatcagcagagaggccccatggagtcattctccatcacggtaccttgtcttatttccaggagagtagttccccttctctgaaatcatactctttctttcttcttcctcctgtattccatgggggcagggagatctccatcttactcaatgccatactcttagggcgtggctcatagtagacactcagtgaatacgtgttaaatttgttgaataagcgaatgaatttggtcctatgaatgaatttagatgaggaagcccatggagttcaagggacttagggacctgcctgagtccacattaactcatgtaactcatccagaactgagcatagctgggattaaaaccaggctagctaacaaaatctctacctccaggagaggcaggagctggggaatgggttagtaggaagggtgaggagaggatttctaggaagatgtggtgacacattggccagaactgaggtgggggagaagagacaagctcttgaaatggggaattaacatatattgggtatctactctgtgctaagcactgtacctggcgctttacatgtagtctgatttctaccctccgctgtatgtattattatcccaattttcatgagctaaagaaatagggacacaatagtttaaataaattgtctgcttttatccatttatacataacttgattcctaagattgacctcttctgaccctcaacatggcctctttgaacatagaattaaacccaggagttctccatgaagatgatcaccatgcctggggttcatggtctgatagaggagggcagtaagagttaagtattcattcagggaaggagtggggagcagggttatgtggctctcaccttgttttgtaagagaaactgaagcacaataaggcaggagactcttttgctaaaaggagagcagtcagaggtggaaagaaggcctgagatggagattcagcccaaaggccttctgcttcaaggtactagagaggggcaggacaggaggaccaggcagggtggagcagaaggctttggagccagaagtaacacagatcattttttccttttctggattccaatctagggagaagaatcaggtgtgcaggatgaagtagggtgtggtgggctgagtccagtccagaccaggagtagcgtgagcccctccctgcccccaattgggccccttccttgcagtggggtgctcctggtcccttgcctgcacacaaacacataacgaccctgcagaccagatgttccagggcaggcctaatttaaagtctgatgccttttgacctcataggtatacttgtgtctatcagactgtggctcttcgttttagtctgcaaaataagatcattgaggccgagacataggccctgccctccacagggccaggttctattcaggcccaaggctgtataaggtgttctttgtgctggggatgtgagcagagcctgggtgttgaaggtggtcccctagcccagggttagtcccagaccactgatgccaattggctgactggtcaggggttgcaggagacctcggaggttacattactgcccggaccctctatctccttcccctcacagcataactcaaacgtgctaaaaagggctttcataaacaactcaagtctgaaaactctggcagctctcccgcccctccagccctggggggcttcaggagggtctgggctgcccgccagctccaagctgtccctagacttcagtggggggtggggagtcagtgctgttaccctttccttcctgcttggtctccagcccagagtttccttaggccccggcctccctgggctccccaccctactctaccttaaccctttcctcccagggaaggagtggccgaggtccccgttctcttgggacgcctgggagaggctgttgggggtaggggggaggtgggggtaaaggggagagatccttgttccaaatctcaaaaaagggtgccggaaaccaatcctcccctccttcctcttccccgtccttccactagcaagaggggaacgtggaaggaaactaactttgacccctggattctggctctgggcccaaaacttgggtggaaggcagaggcctccgggaccctccccgccccctcctcccccccgccggctcccccgccctctcctccgcgcccctttaagctatccagcagacggagacagagttgatccaggaggggctggcagagtgctggagggggaaggctgggggcggagggaagggcggcaggagcccgaccggtcccacccctagctacaaccccgggcaggaagagctcgtcgcggtagcagcggtcgaaggggaccaagctccagagggcgggcgcccgagccgtgcggggtgggtcccgccgcctggaggaaggaggccgtgcggggggcgcgccgcggggaggagggggcgtggcttaggcgcctggggctgggggctggggcgcctgccgccccgagacccgggtgacactatcgtctccttcgttccaggagcgggcggggcagccatgctcctgtctgggggcgatcctccggcgcaggaatggttcatggtgcagacaaaatcgaagcctcgggtgcagcggcagcggctgcaagtgcagcgcatctttagggtcaagctgaacgccttccagagccgcccggacaccccctacttctggctacagctcgaggggccccgagagaacatgggcaaagccaaggtaaacagcttctccccacccccacccatctcttccagccagatcactctctccccttcccctggggagatggtggtccgcagagacaccacccaccctgcccccgcctggatttggcagtgtggcaggcaggtagtgggccatcctcctgcctcgccagatcagcctgcgctccttccatgcccgcttcttccctctggttccttcctttcctgccccaccccttccctacgtgtcacctctgtc

SEQ ID NO: 13880 - DNA, 2911 bp, Homo sapiens
gtaaacacaaatgcacatggacgtgtgcgcacgccgccgaccgcccaccaggcacgcggaccctcggaccactcgcccggagcggctccgccctccggcccagctctgccgaggcctggggcgtcctccttccggccgcccgcccgactgtccgtctgcaccgcggggccgcccggccctcggccgttacccggacaaaaggggtggggggggtccccgtctcgatcccgggggactcgcggccccgcgggggcggcgtatccccgaccggtggcccggttcccacctccgcccgccgcgagcccttgggatccggacgccgggcaccgccgtcgggaaagcgggtcgggtctgcggcccggagggggcgcacagccggcacgcgtccacgccgtccgcccccgcccggcggccacgcgggacacactccgcccgtggccccggccctcgcccggctccggcgccgcgcacctcgaactgccagtgggccgcctgcagcagttgcttcgcctggtcggccgcgcagcccgccgtcagcacgaactggttgatcatgacctggtgcttgagctcgtccatgttcacggacatggcgccgccgcgctgcccgctccggcctccctcctccgcccgcgcctccgcctcacgcgtccaccattagcgagccggctccggctaatacaaatatttactgtgcggctctgactcaccgcgcctcgcctcgctccgccggcgccgcggcatgctgggatatgtagtccccacggtgcgccgggcgccccgggggagcggggccggcaccctaggggacgcgaagcccgggaaggggcgtgtctgagcaccgagcgcccgctgtgcggatgtccgggccgtaacccgagccgggcgcgtccacgtcgtcctcgttgctctcggtggcacccgtgcccctgctctggcacggatgggggtccgctggcgggggccacgtctgtgcatgggcgcaaatgcctgaccacaggatcttggccaaggcctggggaccgtgtctgaactgtgagcgcctactgtgtgtggatgcccgggccgtgaccagggttgggggagtccacgtcgccctcgttgctctgggtggcacccggcccctgctctggcacggatggaggtccgcaggcgggggcctcaggttcgtgcataggcgtttttgccaaggcccaggaacggtgtctgaaaactgagtgcctaatgtgtgcaggcgcctgagctgggaccagagccagtcacgtccacgtcgccctcgttgctctcggtggcacccacgcccctgctctggcgggaattaggagcccagaggccggggccacagatctgtgcatgggcgcaaacgccaggccacagacgtctttgccatgccccggggactgtgactgaacgctaagtgcctactgtgcgcagctgtccagaccgtgaccagagccaggcacgtccatgtcgccctcattgctctcggtggcacccgtgcccctgctctggcacgaattggggtcccaaggtggggcatacagatctgtgcatgggcgcaaacgccgggccacaggcgtctttgctaagacctagggaccctgaacccctctgtgattggcatcgctctgtgttaaatagtaggcacgcccttaagagaggggtctctaggaattttggcccaaatcggctggtctaggctgaaaggcccggcacactgtaggcgccgacaaatactcgttcagtgaatgaatgaatgagccacttaaaagctccgccgcacgtcaccgcctatagctagcctcctagctctcctcactcaatctctcatcgcccactcgtggcatgggtccttcctagcctggctctgggcctgccccactgtagccccatgaccctctggacggcgcctgggacaggctggcggggccagcagcctctggtgcttcggggtccccctcccagcagttctcccgctttcccacgcaaaatctcgtgctctttgccggaaatctcggcccttagcgggcgggcgccaaggcccggcagagccagttccggagcggccccaaactccctttcccagaatgcctcggtttatttgcatcgtttggtcccggtgacgtcagctgagtgaggtcgtgcctcgaccaatggacagcctcggggtgttaggacctggccatataaggtaaacaaagctggtcgcccaatgaagaggcggcgggggcgggcgctgggccggggaggccgggggcggagccgggggcggggcgaccgggcggtgtttacagaccggcacatggcgcttccggttgacgttgctgacagctagtgaggctttagcccgcttcgagcgcccgggggcggtaaggcgcgatcatagcagctctaggtgaccttggtccggctccttgcgccccctggccccagcctccttcgttgagacactatttgttgagtctttcctcttttcctggccctgacctagcgtggggcgacagaagagcaatagccgggtgggggctgtgagaacggctggggttgggagcgaatttcggaaacccggaggacgagtatagccttgcaagatggaaaatgccctcccgggctggcgcggtggcctgtaatcccacctactcggggtccgaggagggaggattgcctaggcccaggactttgagaacacgcctctacagagatttacattttaagaaaattagctgagttcgggtcgggcgcagtggctcacgcctgtaatcccagcactttgggaggccgaggctggcggatcacctgaggtcaggaattcgagaccagcctgaccaaaacggcgaaacccgttctctactaaaaatacaaacactagccgggcgtggtggcagtcgcctgtaatcccagctactccaga

SEQ ID NO: 13881 - DNA, 2850 bp, Homo sapiens
ttttagtagagacggggtttcaccgtgttagccaggatggtctcgatctcctgacctcgtgatccgcccgccttggccccccaaagtgctgggattacaggcgtgagccaccgcgcccggcctcagtgcatatatttttaatatcttgtagttaccctgctgtatactgtcatcttagggaccttttaaacaataccagtatgagcgggacctaccctgctgctcagtgaccccaggcagtgtgtcctaaggtggtgtgtcctgaggcgtgcgacactctgtcctgtcccaggcactgtggtgggggcatccggtgtccaggtgcagaggcaaaagctgctcccgggtttcccagaaatggttccgaggcctgggtcccagagagccagtgcaggttggggggtggacctctggctctgtgggggggtctgttctgctccagtgggccgtgtctgccttgtcatcatccagacagccacagctggctcctgggtcccctcgtcaagcagcatttcccagtaacagtgacttcgtggaacacttaggaagcccttaaaaaccatcctcggacctctgaggcagggactccagggggcacagcacctgtggtggggacaggcaggcaggctggatgcggggagggcccgggaggaggagtgaggagccacgcacggaactgctcagactctcccagcaaaggtcctggcccttgtgcatgcctttagttacatgtctgccttagaggcaaagacgagccgtcacgggggacccaccgggtcaggggtctgcggacacgcttgcaggaggaacccaaggaaagggggtgggggtggagccccacagattgcgtcgtgggtgggcgtggagcttgcacagcaggcctgctgctgcctcccagggcgctggttcacagcacggtcccagcagggagaggctgagccggttggactagaccacccaaggtctcaggttgcagctccctggtgaggagaggacaaggtgacttctgggtggggtggggcatgaagatggaagtctgacctcgggttccaacttgactcaaacgagctgagctcctggagtttagaaagggacaccagcttcagacatcgtgggggctggcatggtttgctctcgtgggctggatgggagcctccctagcccctcctgatttcaggctgcagcctatgggtcactccaggcacaggtggggtgagtcaagatctcactggaggagtcactgagcaagagggccggtgggaggcaagggggcatccagggacaaggggccagctctgcccccacttccccaccccacccactctaatactgcagcccctgtgcttccaactgccccctccagcctggggcccagcccctcaccgccagagactgcccgcctcctcttgggcaagctcctggtgggctccactgaagccaaagtgggcccttgggggcaggagagccagagcaaggcacgctccacctagatttagaccgggagagacctggaggatgccaaccccagaggtcctggggcgagctcagtgctggggaccggaggtgccgtctgctgccagaatcatggtgtgcgtggtccctgcccagcacgggtcagccagagcgagccagggcagaaatgacggccaggtcgatgttcctgtcgggggctgcttgtcccaggaggtaatctgagtcctggccgagcccaaaaaagccactgccctttagagccagctgtgagggtgcaggaggcagtgcagagggagtgggacccacagctgctagcctccctccaaaccctcctgcctccaccagacaccaggtcagggggccacaagtgtgggtgccgggcagctgcccctcagctgagctgccgggccacccagctcgtgtccctcccctgccaggctgcagctgggatggtcacccgggcagcctgagtcagcctgctttctctctcaggtgaggcggaaccaaccctcctggccatgggaggggccgtggtggacgagggccccacaggcgtcaaggcccctgacggcggctggggctgggccgtgctcttcggctgtttcgtcatcactggcttctcctacgccttccccaaggccgtcagtgtcttcttcaaggagctcatacaggagtttgggatcggctacagcgacacagcctggatctcctccatcctgctggccatgctctacgggacaggtgagggtggcctcacaccgggccccctgtccggggctctgctggcggatcctgctgggcgcgtgtagctgggctcagcaacagggccttccgcctgctccccagggaaccctggagggaagcccttggggccaggatcctgctgggcagcaacatgctctccacggggccaacccaggcagggcgcgaagtccatcctggcccctgtccaaacgggtcggctgtatttatagaccgtctcagaggacaggctcctgagagccgttcctgaaaaggtggctgttcctgagctgcagggacccaaggggcccagcaggcggcgctcacgtgtcatcatggcctgcgctcggggagcctgcccacggggtgcccctggtgccccgcggggggaggggtggtgtgggaaggggaggccggctccaggctgtgagctcagtcggctggcgggggtagagctggctgcaggcccggcccctctcagctgctgccctctccaggtccgctctgcagtgtgtgcgtgaaccgctttggctgccggcccgtcatgcttgtggggggtctctttgcgtcgctgggcatggtggctgcgtccttttgccggagcatcatccaggtctacctcaccactggggtcat

SEQ ID NO: 13882 - DNA, 2800 bp, Homo sapiens
aatgtaacgcttgcctttcctctctgcacgtccaggctgccccccggtgtggaccccacccaagtttcctcctccctgtcccctgagggcacactgaccgtggaggcccccatgcccaagctagccacgcagtccaacgagatcaccatcccagtcaccttcgagtcgcgggcccagcttgggggcccagaagctgcaaaatccgatgagactgccgccaagtaaagccttagcccggatgcccacccctgctgccgccactggctgtgcctcccccgccacctgtgtgttcttttgatacatttatcttctgtttttctcaaataaagttcaaagcaaccacctgtcactggcccaggccctggtgtttgtggaaggaagcctcaggcacctgccatttgctggctttcaggagtcatctttgctcaggcccgtgctgggccatgtgggtacactggtgtaggttgctggacacaggctgactcacatccataaagacagaggtcttagggccgggcgcagtggctcatacctacaatcccagcactttggggggttgaagcaggaggagtgcttgaagccaagagttctagaccagcctggacaacatagtaagactgtctctaaaaaataaaaattaggcagggtggtactgcacgcctgtagtcccagctactcaggaggctgaggcaggaggatcgcttgagcccaggagttgtgaagggtacagtgagctaacatcgtgccattgcactccagcctgggcaacagaacaagatcctgtctcaaaacaaccaaaagcccagagagaaagagtgagaccccatctttaaaagaaaaaaaaaaaaggtcatgattgcaaggtcacgattgcaattaaaactgtaaggtggggaaggaggaggaaataagagaagcacctgaggcttgagttctcaggagcacctaggttgggtcccaggtgaaggggcacagaggtaattgcacctcagagctgatgggaggattactatgtcaaaagcttggcatcggcttcagcacaccccaaggacaccacagtggacctggcaagctttgagatctctgtcaccgccacactccctgaggccagggcatccctgttggcagtcacaagggaactggcaagccgaaatggggtgagaacggagcccgcagagtctcggggtggggagattgggcagagccctggccaaccgacgggctcagacctgtgctgctggctgggccagcagctcttgttgcctgtgtttatttccagctggcctccctccaggtgtagacaggcttccaagggcccagttcccctctctcttgtctgcccttgccctagctgccaccctctcaccaggcccagggaaagttgaggtagaaagcagatgggggaccaggcgcggtggctcacacctataatcccagcactttgggaggccgaggcgggtggattacctgaggacaggagttcgagacagcctggccaacagtgaaactccgtctctactaaaagtacaaaaattagccgggcatggtgttgcatgcctgtaattccagctactcaggaggctgaggcaggggaatcgcttgaacccaggaggcagaagttgcagtgagccaagatccatgccactgccctccagcttgggggacaagagcaaaactccatctaaaaaaaaaaaacaaaaaacagatgggagctttggagctcagtcccaaggtcctcaaatatttgagggacccagagtctgaggctgtagcaagatactcccatgttcaaggcggagcatgcagtgagccgagatcgtgccactgcactccagcctgggcgacagaggaagactccgtctcagaagaaaaaaaaaaaaaaaaaaaaaaaaaaaaaaatactcccatgttcttttctcagcccacagtctgactttcccaggttccctaagaagggtggcaccctgcaggcgagggcctggagcatgtccacaccacccccaatatcaccccccaccaccttgctgcttttttgagaccaagttttgctcttgttgcccaggctggagtgcaatggcgtgatctcggctcactgcaacctccgcctcccaggttcaagcgattctcctgcctcagcctccagagtagctgggattataggcgtgcgccaccctacccggctaatttttgtatttttagtagagacagggtttttctatgttggtcaggtgggtctcgaactcccaacctcaggtgatctgcccgcctcagcctcccaaagtgctgggattacaggcgtgagccaccacgcccggccccagcttcttttttagggacagtctcctactgtcatacaggctggcgtgcagtagtgggatcttggtgcaccataccaaagtgttgcagcctggaactcctaggctcaaggcatctccaggagcgcgccacaagcctggctgattttttttttttttttggtagacagagtctcgctatgttgcccaggctggtctcaaactcctgagctcaagccatcctcctgcgttgacctcccaaagtgctgggattacaggggagagctgctgcgcccagcccagtctactccctcgagttccctgtccagagacccacatctggagcagggtggggagtcagagcaggtcccagcccacgctctagggctcagctcagatgatgtgagcctggggcagcacctctgggcatagtgggctctggctggcaggacaggacaggctggcccagatctgggggtctctgctgggtgttagatttgtggagt

SEQ ID NO: 13883 - DNA, 2791 bp, Homo sapiens
gccaaaagatgacctgcccgcgtgtctcctcgccccctcccccagccgtgtcacatggcggccccaaccaggcgggcagtgcgccccgccgcggagacccagggccgcgtcgcctgggcagtgggtgatgaaacttcccaggcgcattaccgcagagggcgcgggcggggcgcggggcgggggtgggggatcgagagctggtaccggggctcacctgttctccaggaggagggtggggacggggggaggggcgagtgcgcgccaacgccgggtgcgtgccctggggcgcttgggcgcggcgctcgtgtccccgccctcccccagccctgcgagccccccgagctgcgccgtggggtgacgggaccgagagcagttcctgtccccggccccggcgcgggggagacgtgagcgtgcacacgtacacacacagcaggggaagaggcgctccaagcggcgcccaactttctccttccctccacgggccgggtgagaaagtagccgggggctatcccgacccggcggttcttggggagggggccgaacaagaaaagggaggagatggagataacttccccggatttagcttttttgtctttgtttttgttctcaccacttccatcggatgactggagagtaaaagggaacccggagcggggtggcgagcagcgctttgagaaaatgcaggagtgtgtttggagacgcgtaaagttgcctttcaagctctggcctccgggcacgcgatgctccgcggcgggctgactcagggctgccttgggcctccctgccaccctcctggaaatgatgcaagtcctgactgtcacctggatccctgcagcccagcctggaatgcgtctggattaggggaaagacgagaaacgacactccaggtgttgcacggcccaccaaagcgggaagatagggcagttgctcagaccaaatactgtatctagtgcttctgctcctatcttcaatcgtggggttctttttaatgcaaagtgtcacaaggccaggaattcccatgtgtgctcagttggcccacagcatcattgtgcctaggaaactgcttcaatttatcaagtcctctgggctgggaatctcactgaattccaaacggcggaaagaggaaactttcccaacccgatgtgggtgtgacgcgagccaggggccccagggacactgtcccagagcacaccgtccccctttaacagcaactggagcttggattcgctcttatattgtacagtcctttcgaccattgccctggagcacccgcacacgcgcacgcatctccggccgcgctcacacacactcatacacacgcacgcaaacgcgtggccgccgccaggtcggcaactttgtccggcgctcccagcggcgctcggcttcctcctgtagtagttgagcgcaggccccgcctcccggccgtgttgtcaaaagggccggggtctcggattggtccagccgccgggacaacacctgctcgactccttcattcaagtgacaccagagcttccagggatatttgaggcaccatccctgccattgccgggcactcgcggcgctgctaacggcctggtcacatgctctccggagagctacgggagggcgctgggtaacctctatccgagccgcggccgcgaggaggagggaaaaggcgagcaaaaaggaagagtgggaggaggaggggaagcggcgaaggaggaagaggaggaggaggaagaggggagcacaaaggatccaggtctcccgacgggaggttaataccaagaaccatgtgtgccgagcggctgggccagttcatgaccctggctttggtgttggccacctttgacccggcgcgggggaccgacgccaccaacccacccgagggtccccaagacaggagctcccagcagaaaggccgcctgtccctgcagaatacaggtaagtgcatgtgcccccgcagccgggagctactgggagaggacaccgtgcacccacgcggcgcgccccaggcgtttcgccgggagccaggcgcccacccagggccacgcaaactcttgggatggcacgggacgtgcaaagggaagcgcgaggcaaggcgaggtccgcgccgggctccgagggcccggaatctgcacgtgctagcagggtgatgaaatggctggggcaggacttgttgctgtcctccccagggtcgaggggaaatgaagcagcgtctgacgctgccagcgccagcccccgcccccgaatcccgggtccggtgcaaagcgcgcttcatcccggccggcacgcgggaggcccagagggtccccggagctgggctgcgccctgcgcccggagaacttctcttcctggcctgccggcctcagtaagggtgccgcgtcttccccctcctcaaaagatgcccgacatcccagaactttgccggcgagacaaatggcattgcgaactttccccctgggggcactgctttcggaagggagcgtgagggcagcgcaaagcgtacctccgcggtgctgccgccatccccagctcctggccaggtcagcaagccaagaaatggtgacacgacccgaaccgtgcgcctcctctgctctaccggctcttggctcaccggcaagctgcaaagcagagccaggcgtgcagggcacggggctggcccttttcccagctcggaaagagaaagaaaatctgcctacagctccttcgctccacgacccctcccccgactttggggggccgtgtgaacgcggcagcggcggcgtgcgtgcgctcaccgcacgagctggaatgcacgagtgcccattag

SEQ ID NO: 13884 - DNA, 2789 bp, Homo sapiens
tgtggcaagactccatctctacaaaaaatttaaaaattagggcatggtggcatgcgcctgtagtcccagctgctcaggaggctgagacgggaggatcccttgagcccaggagtttaggacagcagtgtacagtctaccttgggtgacaaagcaagaccctgtttctaagaaaaaagtgtacataataatagagcaaagtgttggggggaagaggggatataaaggaactctgtaatttctgtacagtgttagagaaataatctcttaaaaagtaaagtctgttttttaaaaatatgcaagatttgggcctcactaaatacatcttgcgtgtatgaagctgaggccttggaataagcattttggtcaggctctccagaggatctgcctgtattctgaggtttgagaattcctggatatcagtccatctcctttcaccatctgtttcattctaagaaagagcttaaaggggctttgtctagagaactgtctcttgtgtgttaggatgtgtttcatctttcagaaggtggacaaaaagcttcctgctaatgctagaaatatttgctgcaattccacactgacagttgaaccacagtaaagacaattcaggcaagaccagtttcagacacaggaactgtcaattttcgaacgtgtgcagcctttcttcagaagtgtgccctgcctgcgtccatttcaaacaagcgtagccatggattataattaaaattttacatatctctattggtttaagggtgataagtacactattgttataatccttggctctttgtgcatcggagtatgtattttattagggctattataggcctttcaaattaaaatgctcctggactttatatacgtatagatctttttcaaccaaaatgctctggaaattagtattagatggaattttattaaacttgtggaaagtcacattgcattttgcaaaagacacacaaaccttggtagcctgtttcaccaccacacagaaattctccacgtgatcaatctctctgctaggagtttggtgaaagcaagacccaagcagtggtgagattgagcctgtgtgctaaaactcagggtaacgtgaattgtagcaatgccatgagccactgcggaattggtttatagcaaacagacaagtcttgcaatgtagaaatcattgtagagtgtgttgaagcatctgctcagccaggatctacttctgccctgttttagcaaagtcactgctaaggtggggcctcgaggtctgtgagccaactcatgctggatgtgaattttgcacatatgtgagatgaggtccctagctttcactcgtttctccaaagaggttaataagaaagtttaggaatttctgatttcgataatggtctgtaaactggatttggttgtagttgtttttaaaatatatatgtgccatgctattgaaatattgcatatactctatagcgtgcaaaaacataggaatcagaaagatcttgatgagaaataaatatacgtagaagcacttgcgttttcactcctggatcatctgtgctcccctctacagagaccactgcccgggtccagtgcttctttttctttagtgtgcacacaaatcacctggggggtttatggaaatgttgagtctgatttagaaggtctcggatattgctttttaagacagcttccaggtgatgttgaaactactgctccatggcccgtatttcaagcagcaggtagatggagaggcgtgtgttgagttgagctgcagacagcgactcccacgctatctcttctgtctctctctctttcaagcagtcctcagcactggctttaggaagtagaaatggcaaaagtctgtgacaccagttttccctggcgaggctggcagggggcccctgggaccttttgactcctctttaactcaggcccaccttttcctgctgctgcctctgtccccatggcctgctagatctgagcccttgtttgattagcttagcaacatctttgcagtactccccagtgaggtgtgctctgttgactgggactagccagagtcagctccagaactcctgagtgagttcacttctgcagcagccttgacttcctgctgtaccttgaccagaggatttatctgggttttcctggttatctggctcactttgcagcagagaagcaggggctggtgccccttcaactgtgtgttctcctgggggatggctcgtggccattgaagaaactttgcagcagtgcagtctatatgccatggtcacgtcatcctatgctctgaaccaaggtggtgtgtgttgtggccacaggagactgttccaggcttgagtgacataagggaagattttactcacgatgtacattgaactcccaaatcctcctaaaaagaacaagtcgctatcaacttggtgacatcctgaagagctgacagtcctggaggacagtaggaaatcgcataaagggtgccccaattttgcatcaagcagaaaggtaggaaactggttggattctctaagtcacatttcccactggcctctgtcagcggttgttggaagcattcccccaaaggcatgaaggccaaagatgtgtgggtctgtccgaagaattgcccactaagtcataaaaatgaaagattacatttcttacccctcttccacctcacatcctcttgtttcttaactgtgtggattgtgcagtctgtcttatttatggttaaagtcctgttaccacagggaaccccaactgagaaaggcattgtcaccttgggctttctctccaaaggttgttgttggttttgt

SEQ ID NO: 13885 - DNA, 2764 bp, Homo sapiens
gggttgtgcagcctaaataatgaagaaagcagcgaaagcttattttgattttgtggtgatggggagccatgggagggtttacggaacgttgggatgatgtttatattctagaaggagctttctggcagccctcgggagagggaatcggggagtgtgtgagggaggcagggaggccgggtaaggcctgagtggtgagaacctctgtgaagccaagggctctagtgctgcagaggagagagaagaggaggcacggttcccagagtgacgggagcacagggagggctgggcagagccgccccagcctcctgacccgggctgtgcaatgctggggagacggaaggaggcaatcctggaggagcccttgctgacagccccaagttgggtcgagggccttggttttggttgccgggcagaatggcagcactgagcagagccatctccgctgcacacacacacacactcgtacccgtgcttgtgtccgccccactgcaggcactcacttgtacacacctgtgtgtggttgtgtttttcttctcgtgatgctcacagaatgtacatggagacagattcgcacactgaggtgacgaggcagagatggaagcctaggcctgcccttggtgtggttccctcatggctgctgaggggagccttagagaaggccgctccctgtgcgggcctggagctccggagcagccaccagggacgggagcctgggagccgtcagccctcgaggaaggcctgggagccgtcagccctcgggtggccctcggatggccctcggaagccatgtggagtcacgggcacgcaggaggcaggagaggccattctccccttgcccagggtggagggtgaagggcggggcagctgtggaggagggaggctgggagttgctccagctgtggtgtctgccacctgcctgtgcttttagaggcttattctttcagggacgctttagctacagagtactattttttgtcttttcttcagtgaaaatagcgacccgtggcgtatccactccgcacaggtgtttggctttcccagagggcctcgaggggacgccgaaggctgtcatttggggctgtctgcccaactctgagccagcctgtctctagggtgctcagaacatggcaccctgaggcatagacatcatgtagatccgcaccatagacggggctgtagagaagccagtctggcacttttgtgggggatgtttgtggctgaattacacctttgggcatctgtggtttccttttggacacagagaactcagcgtgtgttgtcatttattttcatgtcatggtttagactaaaaaggtttccattttctggttgggcacagaaaggccccggatcacctccgagccccaggacgcagatgtgacctcggggaacaccgtgtacttcacctgcagagccgaaggcaaccccaagcctgagatcatctggctgcgaaacaagtgagttggggccaaacagaaatgcccctgtgcatctctcggagttacactcagacacccaaaccacacctcactccccaccaaggcccacgtccacttttcctcctccacgtagggaaaagtacaaaggagaaactatttctgctccttttccggtcttacatggcagggggtgtgacgacgtttctgccaggctggggccccttccccactctctcctgggcagcacaggggtgccctggctgggcaacgcgtcactgcggcccttcccggtgggagggagggagagcatgctggttgttctctccctgcctgctgacgtctggcagcagcctgtttgctctggtcactgttgttggcagccttgacctggggcattgtgaccaacctgagtgggtgcgggaggggccctgacctctgctgggacggcgtcctcaggagcctggagcgccatgcagctgctgacacaggttcgctcagctcccgtgtggatctaacttgtctcccaaacaaaggaagtcttctcttgtgtccacaaacatgctgtggacctgttaaggctaagacggccctggctgcggctgtcagggtgacggagggaagtcctaccgctgaccattacatgcgtcctggcagcgagccccacctgtgagccaggtgtggggagcacccctgcgctgctggggtttgtgagctggggctgtgttggttaaggagtgatggagtctagggggaagagatgggaggaggtgaaaggcgtgcaaggggggtgggtggggcaggacctgggtgcaggggcagagaggcctaggtgggaatgaggtcagattgccggaaggcacctggggccaaatcactgagggtcctaagttggagtggagcactttcaaagtgaccttttgaaaggaatccttaaaagaaaatcctgaagtaaagccaccatgtcctaccttctcccatctgcctgcgtgaggacagcttctgaaggagctcctcctgccggcccagccccagcactcctgcgctgctcctctctggccatgtttagtcatgaggcagcaagagggatgcgtctgagatgtgagccctgtgatactcgggctcaaactgagtcattgtttgatactcgggctcaaactgtgatgaggcacaaactgagtcattgttccagactccagaggcaaaccgggctgggcttggctctcgggcaaggtggtgtttatagaagagatggacaggagcagggagctggccatccccagtggtcaggaacagaatgggaagatgtgttcatgctgaagaggaca

SEQ ID NO: 13886 - DNA, 2712 bp, Homo sapiens
tgagcccatcatccatctaaagtctctccaaatactggtcagatggaggtttccacagctgccattctaaatgacaggacatgtgaccgagtctggagccccatcccagctacccctcagccttccttccagccaaggacaacccactctgcccagagaggccacattgccctccagccaagggaccccctcctttccgccctaggaaagaagttctgtcctctatccccaaggagactgcatatccttcaccacctccactgaagtttctaatgttagatggtccttctcttcacagcacctgcccaagtctgtgtttagatgcctcgagcctgatccttccaactaacatagaaatgccaaggcccggcatacttccctggccatcctacacccttgttgaaagccggagtctcatggacttaaaagttcttcaaaaatgaagccagctagcttctacccccatgccacagcagccctgcacagattagtaagcccactgtgactctgcttagtccaccctcctgcccatccgcactgatcaccaaccactaagccctgcctgcgggagtccaaggaactcactaggtctctgactcaacctctagtgaagagggggtttcccaggagtgaagtacctatgagggttactgccccttctttctggattttggctctgaaagtgtggaataagagagtgcacagtgactcttccacttctcaatccaagagaactccatacagttctgttctattccaatgacctctgatcagaaggaaaatggctattgcaataacatagcactgagagattctgaaagaatcaagccaggcccttttggagatcaaagctttcaggaattaatgctcaggtaattcacggagaaaatgatgtgtgggtaatttctggaatcttttcacctgggcagacacatgactcccaccagagctctcccacctgttgctttgggtgccagccagaaagcattgtccccgcccgggctggattctagccttgggtcaaacgggctacagtgccaatgaagatggtactcagcgaccttggttcaccagcagaacctgagaaaccctcttctacctgaaaggaggagcagccccttgagggcagcacctgccagtgagtgtggagccaggccaccctgtccttacaaaactcttgcaatgtttgatagagagtagacatccgagggtataaagtacttttcctgtgcatcttctcaattcccaggtagtctcagtgagctcgaactattcacccagaaaagacagtatgaactagctttaccctgggcccctgaccaggcctggtggtggcagctccaactccatgcagacaggagctgggctgccctacctggagaagctagccacctactctgcccaggaatgtcttgggtgtccccagaaggcctgctccttccaaagttgaaagcaatggtgatctgctgaagacactggaactccgcaggaaactgctgagcaaaggaggcaaggaaaaggatattcttggaatatccagaaaaccaagtcgggagggagatgcttaagggaagagaaggggctatctcctagggagtggtctagaatcttcccatcactgacacccaacttctgcccattatcggaggtgcatctgtcccttggtgagggacaggtaaggaggactccagcagagcctcagcaaacaagagctgtctgcctgctgcaggggagggtgtatgtgtgacagggagggttggagaaggggctgccttccaccacttgtagtcctaggaatccatggacacccttattgtggctgcgggccagtgttccaggggcccttgtcctggggtgggaggaaggagctgtgaagatgccagcctactagggacaggggtaggaccaggtgtgcagcctggaacaagggacagagggaggaagcagcaccatcagcactttttccttaacacctgggtgtgggtttgggtgtgcatttcttaggcaaagaggcatctcagtgcatgttttaagctgccatctcctccttttaagcctcctagttaatatctgctatgtgaattatttactgggaacagatgttagagtttaaagagcactgagcagagatctttggctaatcaatttattttaacaggtttaagtctttactacacacccaattggagatttccctgccactggaagcctgtgctcctacaagcctgtgttacacatatttccagctcgccccaagcttgtttcctgctctttagcccctccccatcctggccaaagtgcctccttctcttggtatcctatttgatctgcagaagtctaatttgacctggagaaagaatttttcctcctaacatcagtcctcaggttggactaaatggtcactcagtgagatctggccatgtccttctaggctttgagtcatgtttgctgaagccatgccagtaaaatatttctgggattgagaagaagtcagcctgacattttaaacaaacaagggctgcaagactaaaagacccatctctgcctctccccaggggcgtttctcacggggtgggtagggagggcttcgaagcagcctgtgaagtgtgggcagcttgaaacacacgaggcagcaaatccgaacaggcaaaggcctcactctccagtgcagtctgggaggactgatcagggaagaacagatcagggtgaaga

SEQ ID NO: 13887 - DNA, 2707 bp, Homo sapiens
agataaaaatcccctttcctcccacttacctctctctccaaaagaggctggaagaagttcctagaccaggaaggcactgggtaggaagtaattgtgtaagtctccctgtctcctctgccagtgctttttaatccttatctaccaatcttccctgctatttcatgaaaagaggatcccagctgtgccaaatagtgtggtagctatataatctagaaacaatccacagggggttaggacagaaattaacaaatctattttagcttgaaatcttacttgtaaagaatatcaaccagtttcccaaacatctacagaccagacagaaatgccatcatctcactttataagaacccaagtgtgcgggctgccatgatcaaaatcttctagaattggattttgctcatcacagcagtgtccaccttctatgaggactagaggagaacaaacacaggactgggagggagatgtcttaggttccagtactgaatttgccacagactagttgtatgatctttgccaatttcctgcaactctttggcccagattcctgtctataaaatgaaaaaaaaataattgaactagattctgtaaggatctttccagttctaataaaatggcattatatagctatattttcacactataattaataggccaccctctcctcattatcctgcatccagttagattaattgacacttgtggtttttttttgcagatgcactgagagatggtgttggggttgggaacctaactcattcctggtaccaatcactggtcacttctcagatgtggagtcaactgaatgtgcttttgtgtcctacctctttaggttcttgtagagcaacctcataccaaaagtatgaggaagactaggtgaagagatctgggctgccatgtgtgtttgtgatgttccctggaggactcaggattcataaatcaatggacctcactctctttaatctttgggagttatatgcatagtgtcaacatttaataattataactagggctcggggggcaatttgagatagtatgttgcaaaacatcaccaatgagacctgacatgtgagagaattttcctgcactaagaatgacagcagatgccacattgaggagctgcaaactgggagcaaatccactccatcctactatgagcccttcctgttttgtcagctagcatggtttcctaaatctcaaattgcagcagaactgttctgcaattccatggctagctatttcgggagcctaacacagcaggacaaatgtgcacaagtccacacagtatgacagaagaattaaaaatgtatttaccatctgttggtagtttccttgcgggtctcttttcttttcctctcctgcagccacaaatagggtcttctcacttccttccaacttcagagagctgggttctcttcacatctctgcaaatgcagggcttggttttttttttttttttttttctcttccttttttcttcttcaaatttcccagactgttgaactctggtctatttcagcttctagaatcatttccctcaaatacaaagtggagtgaggctgtgaagaggttacagtgttttgcacatcttgtgtggccaggctactttcagacactatgcttcgattctggtcacagaggactctgggaagcttgcgggtagaacaggagaagttcagcccagagtaactgaaggaaattaagtcattaaattagccttgagaattcatgttggccctttacgatctccttcgtccttactgtaatgggatactttagacaggactttaataggaaagggttctagggattcaagcatgaacctcaagtgagaatcatttccagcccatgtagcagcatgagtaaaaattataagctggaatagagttctgttagttgggaaaccacttaggttgatctgaagccaattcgcttatggagaaatactcagttctcaatgagcatcactagctttaatttctgggatacaggtgttattcacaattcatgtataatccaaaaactagagattggattaaaaatggtcccttagccaaaacattgcaatgcagtgttatgactgtaactgtcctatttcattcaggtaatgacttgttaacaattctcaagctgcataggtggataacttcactttgaaaccagtgctgggtgaccctgaactttgggcaggtcctttaaactccaagcctcagtttaatcacctaataagtgagaatcatgatctctatctcacagtatcatcatggggatgaaatgaaatgacatctgcaaagcctgagtgtgagactcagttcattccaactcagctttaatagtcatgtcagacactaaggcaaaggtcaagtaaagagaacatatattataccatagtgtggaccagatggattagttttggattagctcctaatgagataatcattgtgttgggggctgacagaactttgcacatagtaggttctggaaaacattactgattaattcatttaatagtcaatgcctatttagtgggtgtctatcatgtgccaagaactattctagatgaatgagccagacaaaaaaaaaaaaaaatctctgccctcctgacaataaacaaacaaacaaagtagatgacatagaatgttataaagcaacacatttatgggataaatgagcagggcaaggtggatcgggaaagtgagggagtagaatt

SEQ ID NO: 13888 - DNA, 2702 bp, Homo sapiens
gtgtcattgctagaccaaagcctggccttcctggtcattcatgcaaccaggacctctggggtccttcccttggtcaggctgtgctgggagcagtgggaaccagggatgtccctgagttacgtcttgtagggaggacggacagtcacacagacaaatggggcatgaaaaggcatgacaaatggggctcggccacacaaatgcacaatgtggccaagcctttcccagacagctggtcagggagctccagaggctttcctgaggaaggggagctgtcgctggcacctgaaggtcctgtagagagacgagggaagaagcatctagacaaaggccctgggtgggaggtcagtgttgacggagcagagagggagccaggcgccatctcagggaaccctcagtgggattctctccactaggatctggtgccatagcaggaagaaccctgtcgcatgtgggcaggaacgagctgctggctcccatcagctacttggcagtcacacgccaccctccctcccacagagtcttccgaggagtggccagaagctcaaacacagccgtgtccctctgtgcgtgagccagggactcaggcctcagacagggctctcccttgtagtgagcagagtggccctggcccttatttgaggtggtcacctgggcgctgctactgctaccactccagggctgcttcgcggagccactgtctttgggctttagctcccaccactccttcccagcaggcgtgggttcttagacttcagtggaccacctttaactggaaagcgtgcttccttcccaacagaacaagcggaccaacttgaagaagcccaactcggagcggacggggcacgggctgagagtccggtttaaccccctggcactgctcctagacgcgtctctggaaggagagttcgatctggtgcagaggatcatctatgaggtgagctgcagccggggaccagtgcacgctgctgggggcgaggggatgggcgctcacaggccgtgtgtcctaggtggaagatcccagcaagcccaacgacgaagggatcaccccactgcacaacgccgtctgcgccggccaccatcacatcgtgaagttcctgctggattttggtgtcaacgtgaatgctgctgatagtgatggatggtgaggcccgtaggagtgtggggtggacagatttactttccctgctttgcataaggaaaacaggcgtgttctagacaattaggaagcacggaagagagaattagagcaagaacacccatcatttcatccttgaaagacagctgttgccagggtttccttgcctttttttccagccttttctcttgatgattttgttaaaaacgtggctgtggttatgctctttctgtgcctcgtcattaacattgcagtctaagcattctgtgaatcattccatcttccccttctcatatgttccgtatggactcttcacactctgtgctccgtgtgaaaagcagcctcagcatccccctgggtcaggcatgtaggttgtcgcattgttcattccgtttgccttcgggagctctgctgctgggcgaggcgtgttggtctcctgtgggggttattttgaactttcagacagctgacattgtgctgcatttgaatcgtggtaaaatacacataacataaaatttcacatcttagctatttttaaatgtgtgtttcagtgtgttatgtacattcacatcaccatgcagtgtggcgtgaacatctgtggattggccatttcttaacccattccctgtgcccccttttcaaaatgtatgtatggtctgaaacaattggctcatggaaatcctgcctttaaagaaacaacactgagacttgatggcacaaaggtgaacgccttccgcgagattccttagagggaaatctctgagggccacgtcctacaggacaggcagtgccaggcctgcaccttcacccacgctctattccaggacgccgctgcactgcgctgcctcttgtaacagcgttcacctctgcaaacagctggtggagagtggtgccgccatttttgcctcaaccataagcgacattgaaactgctgcagacaagtgtgaggagatggaggaaggctacatccagtgctcccagtttctatatggtacgcaggggaggcctggggccacagtggtgctgtctgctgtggtactgccatggcaacagtcagccggtgccagagaagcttcagcacagctttctgtttgttttttttaagacaggagacaaggtctcattctgtcacccaggctggagtgcaatgtcgcaatcatggctcactgcagcctcgacctcccgggctcaattgatcctcccacttcagcctcccaagtagctgggactacaggcttgtcccaccacagccagctaattttttgtactttttttttttttttgtagagacagtgtttcgccatgttgcccagggtggtctcgaacttctgggctccagcgatctgcccactttcagcctcctaaagtgctgggatcacaggtgtgagccaccgtgcctggcagcacagcattctcgagctgttccaccttcttcaggggcagccaggatgtctcactcgagtgaaggtcacactgccccttgttttcattcctgaaaacatgtttgaaagtccatgttgttagaaggattctgtgccagattcccaagaaaacaaaatgacttggc

SEQ ID NO: 13889 - DNA, 2700 bp, Homo sapiens
ggcctcgttctctgcttctttattaatagactcagctacgcagccgcgggagccgcagacccgggcaggagagctgcagcgtggtcggcgggaggggaataaggcctccccagtgcggctgcagttgcaggccggcgcgggctcgttgcagctgccgagagcccggccaccatggcacaggtgagcgtggcgcctcggcgtccccacagactgggtccctgtccctgccccgcccggcctgcaggtggcacctaggcggcgcgcagggaagggcgcacggtcaaggccgaagagccctgggaacagacagggcgcggggccaatcccagctgggcgcgcaccggggcgctgagcgagggaggaaatgaccttggagcggggacctgtcggtggctgaggttccagggaaaggagggaagggcatttgcggtgagaatgacagtccagcttccgtagtgcaaaccgcgaaggcccacgtgcaaggagagcctcacgcgcgagagccgcccgggctcgtggggtgcagccgcgcgtcaggaacgtgtgccctggcccagcccactggcctcttggggcggtgaaatctgcgggggtcgagtgcctgggctcactggtggtccagacaagcgcaagcagggggacaaacccccaacttctaacctcaaagaaatgcaaattaaaaggagagatgagagattcttccctcccccacccctccttttaggattggcaaagattaaaataatccataatcggagacagggccccgcttgcacgcgcgggtggcagtggaagttggtaaacttttcggcatggtagcttggcctgtgtcaccaaaatgtcgcacgtgcctggttgcttcccctccagggatctatcctacaggataatcaggagctccaggaggtacatcgacggccaacgcagcttttatttatacctgcaatggtggggtggggggcggggaggaggccctaattgtccaatgggggccgcgtaaatggatcacagcatagtcaaaggaaatcttatgcagccttgggaaggccggtggtcatctccgtcccccagcagagacctgtctacgacgtaagccaagtgaaaacaaaacagccttacagacagcttgcatcctagccttcctttaaaacagcgagcccgggaaccgcagggagagttaactgcagcggtggtggggggcgggatcaaaggagaactttcattttctcttctaaattcttctgcggtaacaactaaatgatacagaaagaaggatggttgcaaacatggattttttcataactagaagaagtggtcgaacttaaaaagagcagggttcataaaagaggtttaaaagagtctttgttcataacatcggtgcatttatggagcacctgctgtatgcagagccgccagctcgcgcctggaagcattgcgggcaaagataggggaggggtggctcccggtcaggaagacccccttggccctcctgttacgcttggggcccctctccctccccctcaaccccctgggtcccctgcagctgcgctcgccctagactcctgggaccggtggatgttcagttcccgctcccggcccctctcccgagctccagcacaagggtctctcggtcgctctgccctggcctccagctactcctctcccagcacctattatgttcttgacgctggaagaattattttagtaaatctcaccaaagccccccaagtgaggcatttttatcctagctagatgaggaggagccacgctgcctctggatcgcgatgactgccactcgtggtataaggtctgatttggggcatgggctgtggaatcagatctggacccaatgtccgatctatcacttccccgcgcttttttttttagagacggggtctcgctacgttgcccaggctggcctcgaactcctggcttcaagcgacttcccgcctcccgagtagctgggattacaggcgcgccccaccactccctgtggatcggttgcttctcagctcggtgatgtggggtaacttatttcctggcccgcgacccttgtctgcatgaaagagtcaggggtgaataccatcagggggtgcctggagcattacacggggcaatgccgatagataagtcgcgaggatcagccaggcacggagctaagcgattttatgcgcacggcctccacgagatggctcgttttacggatgaggaaactgaggctcggagggtgaggaatctcgtcctagaccccattccggcagaggtcgaggacgcgagcacccgctcgagcctcagtttccctcccctcctagccccgcggacgccccgccccgccgaggccccgggcccgccctccgcgcgccgggagtcacccgcctgcaggcgccgcagccggacccgcctcagccaatccgctgctgccggcgtcgggtgcgctcggcctcgcccgcggccctccttccccggctcccgctcgccgctcgttcactccaccgccgccgccgccgccgccgctgccgctgccgctgccgcacctccgtagctgactcggtgaggcccggtcgcccgcggtggggagggtggcggggcggccctgcgggctgcgggggccggggacgggcggggcgcggggctgccgggaaccggaccgggtgggggacgccgccggaaccggggcgccgagaggaaccccggtattcc

SEQ ID NO: 13890 - DNA, 2697 bp, Homo sapiens
atgtgcaggtggggaaacttagggccgaagaggcggtgcagcttgcccagggccacacggcccccgagctgggctgtgagcccagacccctcgccctggagccctcactcgcaccctggcactcagtttccccctgagtgcagggcctggggctcggtcagagcccgtgtctgaactctacccgcctccacagacggactacttccaccttttcatctgcgtggccatcgtggccatctacggggatgacgtcatcgagcagcagctggccacggaccagatgctcctgcacttcggaaacctggccatgcacatgaacggggagctcgttctccggaaggtgaggctgccccagatgtgggccccaccccgccccgcccccaaagccccaccccaccagctcgttctcagaaaggtgaggctgccccagatgtgggccccgcccccagagccccatccccaccatggccccccagcacgtgccctcccccacccatagcactgggggctccccactaaggcctcgtggtcagcacctgtctcggcctggctgtgtcacctcactttcctggggtgccagccctgacacaggagcctccctcgctggctgaggagggaacgaattcaccggggctgacggacaggacaggttccctaccctggggtacctcgcttacaacccagaactgggaacactgagaaggaggctggacctggggacagggtggccagaatactggggaccttgggctttggccccctcccccacttcccagacgcctcctggagatgctgcccgttagctctctggtggtcctcagggcactgagcgggggtcccgaggtcggtggtgtcctctggcacaggacacagatcctgcaggagctgagaggctgctgggggtggggggtggagcaaggtgcgggggaagaagagaggggtgctgccaaagggacaggtgggcttggctggacgccacccggccctgtgctggtgttggtcctgttcaccctcctgaatgaagcccattcaagggccttgttcacctcgagccacctgtgagcacagcccgagtgccttgtgggtcccatcactgcagccacctaagacccagggccccgtggtgccggtgatggtgggagatgcaggcagagccctcagtccaggactcggtgagcccccgaggtgcaggccgttgttgctgctgttgctgtctttggccactcccatggggaccctaggctgccaggctgtcccccggcccctcctcaccccccgtcctctgtctgcaggcgaggagtttgctgtaccagttccgcctcctgccccggatcccctgcagcctgcacgatctgtgtaagctgtgcgggtcaggcatgtgggacagcggctccatgcccgcggtggagtgcaccggccaccatcccggctcggagagctgtccctacgggggcacggtggagatgccttcccccaagtccctgagggaaggcaagaagggcccaaagacgccgcaggacggcttcggcttccgcagataggtcgggcccccgacaccggacaggggttgaggggacctcctcagaggccctgggcacgggagggggtggggctgggcgtgaaggggacaggggacggtagaaacctaaggaaaatgcttttgggcaacatgagaggaaccttttcatattaatgacaaaattagagtctggaagtgacagaagtcagatctacagccacccagaggaaagtcagctcctgaaacgctgcagtggaacgcgcagccaccgcacctgagacgcaggctggctgggctctcctgctggctgccctggaggatttcaacatgtcccaggatttgctccaccctcgagggcagccagacagcgtcgccaggcaatgaggaaagcagagacaggagaggaaggcctcactcacccactgcgtcgagggctgcagaacacagcggggtcctgtccaggcccagggacatctttgcaagccagacacacttcctcttgagacctcgttctctcggagtgagccaaacacacttcccaaaacgtccccagccacagctgggatgccgatggaaaggcatctgccataaaagaaaagcaaaagataaaaagcccaaccgatgtggggatagagaggcggaagagcagtcaggcttgaggagctggcgcttgtaatgtttatccgtttaaacatttcgtcctcctggtacacgaagggaactgtctgcccaggagcctgagcctcaggctgttggagaagcatctgatgcctttttctttgctgggggtcttctacgtgaggttccttggcgttgtttaaggtcaactccaccaaatacagcaaccagctggggcttgaatgggtcgatgtgtgcgtgtgtccctgcgtgcatgcatgcatgcacacgtgcgtgcgtgtttgtgtttgcaagatcctctgacaatgatctgctttgtcccagggacgtggtagtgtattagctgaccaaccaagacaaggacacctggaaatagttagactcttccacttcccttcaggacctgtgaactcagatatgtaagtcagcttctcaggtggtcggacgtgagagcgaccacagtgaaggagccagcactcagggctctctgccttctatgtgggaatgaggtcttcccaacagactctccctcttccaaa

SEQ ID NO: 13891 - DNA, 2688 bp, Homo sapiens
gcgagaccccctatctctaaaaaaaaaaaaaaaaaagttacattttaaatggtttatgtaagcctcaactctgcatcctagaaggcaatgcctaaaatattggcctcttgccgtttaagaaaaatttgctgacctctgttctatgggattttatctgcttggtaagacacagctgtcaaaacgtaaagaggaaaaaatgtaaggacatttttcacagtgattattggtttagcagttgcagtaagtaacccaaaccatagagcagacatttgggctaatgttaattcaacatcattattctgcacgtttttactagagtggctgaaatgagctataccctagaaagataaatgcagttcaagaatgctcactgcagtcttctttataatctcaactcaaatgtctatcaacagaagaatgtatatatgacttgtgccctactcatacaacggaatgctatttaatagttaaaatgaataaactagagctatatggatgatcagatggatcttataatcttgagcaaaacaagacaaaccgaccgggttacagaatgaaacaggaacacacaggaagttgtaaaaatcttctgtatgacttatgaacacacgcatatgcagtaatagtataaaaacaggaatgggatgctttggaagagtactcggggtgacatgaggaaggcttccaggggctttaactgtattgcaatattcatgtcttaaacatttgaagcaagtgtggcccgatgttaggattggcttgttcttgagcacatgggctctttacattactctcctagtttagcgtgtgtttgaaaatttcacaatgagaaaagtcaaatgcgggtgtttgagctatttcatgatgagaaaaggaaaatgagggtgctgccaatcagagtatggcgagctgcaggggttcactcacgatgcacttttactgaggacctgtgtgctggcaggtgctgggggctataacctcactcccggcttcttttgtttaaccgcccagattcgtgaactgtgacttttcagggtgttttcaaagacagtggctgttaggcccaaggccccactgtgggtcctgggggtgagtggcagggggcccagggacggtttcctgactccagttctgcttctggctgcctcctgaaaacacaggggcctgtctttttattaaaaagagagagagagagaaagaaaaaaaaagaaatctctagttctctttgtttcttgtctcagcttctttgctaggggccacctcagcagcagccgccagtgaggactgagggactcatttgaggttcgttcatttcttccttccttcactcattttttccgacctggctgtcaccaggaaaagctggccgggttccacccgcaggggtccatcgttccagaatcttccttttcctctcttgacctcaggctgggccctcatggaccgctcgccgacctcagctgttggggaccgggtccctcaatctccgcgtcctgagcggtcggcggcggtggggagagggcggcgggtgcccccggtcaccgcgctcggtcgggctcagtcccggcggccgagcgtggggatccgggggcccctggggtggagttgtccggaagcctgggctccactcctgctgcctcacagccttgccgtgtcccgtctgggcgcctgcgttcccaagtgacaaaatgacctcgctcctccgaggggtctcccaacctctgtccagatcttcttccccgctaagtgccctgtcaccggaggggatgtccagtgtgaccccgcgggaatgtcggggtgcttgggcccgggggtgggacagggctgctgcagggagggcagcccccgtaagaggagggaggacggcgacaccgctgagcgcagacggcgcgcggagccggggctgggcgctcaggtgcgaggttccgtccatctttctgaacccacgcaggtgggcgcgggaagggacccggcagccgccagggcagggtcagctggcggggcagccccgcacggtgaccctccttgggtcgcggggagccgggcacgggagtgggggagcgcgtctttgttggggaggagggcgggcgggacagggtaagactggggttccaggcccggggcgcgaacccgggtgggagggcgcagggggctcccctctgtccctgtcacctccacccatcgccggccgccgctaggggttccggccccgcgccctcccccgacccttccccggcggaggtcctggggcagccaagcccaccgcccggccctcctccgcggccgtcccgaagacccggagaagtggaccacagggggcggccagtgtcaggggtcgagtcctccgcgctggccgcggttccggagatccgggctttgccgagcgccccgcgccgtggccggggccggggccaggtccgggtgcggggcctggcgctgcggccgcgagctcagcctgtaggctgggctagcctccgtcggcggcgggcgctcaggagcggggccgcggcggccggaggacaaagggcccgaggtaggagcggtccctccgggcggcagcgggcggagcgggggcgcggggctgtgcggggctgctcggggcgggcactcggcgcccggcggggaaggtgcgccccgccggacgcgggcacttcctggccctggtcccgggaaggaggtggaaggtgt

SEQ ID NO: 13892 - DNA, 2682 bp, Homo sapiens
tcctttggtttacttccctgtgatctgtcacttaggtaattactaatttttcacagttgtgggcgacatgctgatttttgtgcaagggtgcgtgtgttctgtctgtactactggaaactggagttccatgacaccgcagcatacttctagggtcttgcacacctggtctggcttcagtaagggaataaaccaagtctagagtgcaattagcgtttgaattagtgacatgaggataaacaggtgattatcccatctaatagctgttgaatggtgttagagatactatcagaccgcttgagcttcaaacgtaggggtttattgacgattaagaaaggactatgggactattggtttaaataaatgaaaatagggtttccaaaatgaagttatttctaagtgctttaaaccaactgattccaacttctaaagttgcttaaaaggtgaagagcagaaatcacatttgtacttccttttgtctgaagcgctcacagtgttaagtatagacattcttacacactttcggttaggtgaagaacacataaaattcagtaactgcattttgcccacggggagaccaagtcagaactctctacagacttccacagaggtcacaatcagacactgaagagacaaaattagaactcagtgttctgggctttagaaggatcagcttctaaaaccaacactttttctctctgaaatctatattgagatttttagagttagcaacaggtgagaacatttttattgatgtttggcttcacagttttaattacctgttttggattagagcttgtgggagtctgcagtctgagttggtggggacctgatggaatatattacagctgctattttcataaaagtttatgcttaactttttttgccttaagttttgggttcgtggatttagggtcaacacaggattacaacggtctaggttttccagaattgccacaaaattcagtaaaactttcactgagccacccttcttggtgaagaagtaaaaccttagcaaaagaaatgctgggaagagtgtgactttgataaatgcaaatatgactttcttccatgtacgtgtgtagcactgaaacaaatttggtctattcctttaaacatatacagtacaaatgtttttcctttcaaacaaatagaaatcattaccctttactgattttagataattcacaaaatgagttctgtttaccaatcaagtaactcatgctggtgtttatatctgagggaaaattagtgaactcacatgtctggctagcctggcctctgatttgcatatatgtaaatcagtccctttcatttttttcatgatcagcctgctagtccaagggttagatcatcctgaacagtaagctggcactttatttgcttgtaagagagaacttatacatctgctatacaatctgctatacgtttttggaggcgatgatgagcagtgaggaggagggcaaggactggcttatggtggattacacagacttactgtatatatggcccagatgctacgtggaagacttacacaaaaattccttgtttttgtgaaggttagacttaactaggcatctgtattttttgtttgctaaatcaagttagctaagcaggttagtgctggccactctttactggccaggcgtcctgggggggtcttcccagcaagctctacagaagcagcgcggctcttctctcgtgggtgtggatcttgagatgggcgcgctgctctgatgcggtgctgcgtctcccttcaggaagaagatgggaatcgtaccagttcacagagatcttcctggtcctcagttaatacagaatattaatgaaacttatcactttaaatgaacccaggtagccgcccttgtcatcttaactaccaacgaatgtcttcaggccgttaagacagggcaaaggggtgagaggatcgggtggggcgagaggaaagcctggcccgtgcgggggtcagaccttcattctgccgtcagctgtgctggagactctcagcaagggagagacgtggcgtctctgagtggtttttgccctaaaggatgcttacggtcataggaagcttttccatgtgtttccttcatgggtgtctacggcttttgttttcagctgcgctttgcacaggggctggaaggctaactccccaaaagggaacttcctctccttctagaaactgacccctggtggttgctatagcaactgcaaagcgagaataatgagctgtgtaaacaagccccattcccagtactggggcgttgctagccctccttagagagggcgagggagaggaggatgctgtgcctggaaagcggctcttgaggagagctggaatctcggcaaagcgtccactccctcccctcccctttcctctcacctctagtgttcccaccagccccggggaggagacaaaggacgtgggagggcagcagcatgcagggggcctgcctttgacgcccaggagttgaacaccagacagaaaatgaaatctaaacatttacccagagccctgggctagaaatgggccaacctgaccctggaaaacaaacaacccgcgtcaccgccacacctgctgcaggccccagatgccacaggtactagaggaatgggctgcaaggccctcagctactccctgctttagcaattcaggcagaactgcctgaagatttctgagacctc

SEQ ID NO: 13893 - DNA, 2595 bp, Homo sapiens
tgtgatcctttggaggagaagaggcactctggtttttagaattttcagctcttctgctctggtttctccccatctttgtggttttatctacttttggtctttgatgatggtgacctacagatggggttttggtgtggatctcctttttgttgatgttgatgctattcctttctgtttgttagttttccttctaacagtcagaaccctcagctgcaggtctgttggagtttgctggaggtccactccagaccctgtttgtctgggtatcaccagcggaggctgcagaacagcaaatattgcagaacagcaaatgtcactgcctgatccttcctctggaagcttagtctcagaggggcacctggctgtatgaggtgtcagttggcccctactgggaggtgtctcccagttagggggcatcagggacccacttaagaaggcagtctgtctgttctcagatctcaaactctgtgctgggagatccactgctctcttcaaagctgtcagacagggacctttaagtctgcagaagtttctgctgccttttgtccagctatgccctgcccctggaggtggagtctacagaggcaggcaggccttgttgagctgcggtgggctccacccagttcgagcttccaggctgctttgtttacctactgaagtctcagcaataggggacacccctcccccagccttgctgctgcctcgcagttctatttcggactgctgtgctagcagtgagtaaggctccatgggcatgggacccgccaagccatgtgtgggatataatctcctggtgtgccatttgctaagaccattggaaaagcacagtattggggtggagtgtcccgattttctaggtaccgtccgtcatggcttcccttggctaggaaagagaattccccaaccccttgcacttcccgggcaaggtgatgccctgcccttcttcagctcacattccatgagctgcacccactgtccaaccagtcccagtgagaagaacctggtgcctcagttggaaatgcagaaatcacccgtcttctgcattgctcatgctgggagctgtagactggagctgttcctattcggccatcttgggatatcaagaataaatgtattctgaagggtaattatttggtctcctgatagactctaagccctgatgatatgaatgtattatcatcttcttacatctttgtactgcctaactcaagggtagtctacactttcctctattatcctacatcacatttattactcttgagttgcttagaatttagattccatttccaccagtttattaatgtctttaaaattgctcatactcacaaagaaccattagtatttcttttgttcctctttctttctttctttcttttttctaaatgtgtaagctctccatattgtttagttctggttttttctcctgattggataaaaacagctaatatttaaagaccattcactatgtgccagatattgcactaaaatcatcattagatgctactttgagttctttcccagcccagatgagagcaaggggccctctaggtttggctgaggcagttaaactgattcactttcccttgaaaccaattccaggtgtagttccataatataaaaaagaacagaggagcttgcttccacaaggaaaatcatttcaattattcatattagatgtgttgtttactacagaatcacatttggaaattatatgagaaaggaacgtctttcataacaaagtatatgcccttgactgttattaatatttgcctctttttttccccttcagctcagtgtgaagtggatttttggtcatcaggcaaagaaatacttttggcttgagttatctacttatctgtccaactggtaatattaaccaagcaattatctttgtgttgtgtagacctgacttaaaaatactttaagaagcatcatgaaaagttttgctattccactgatagagggaaatttattagaggaattcaaagaccacaaatatggaaggtgtaaaaatgataacaaaagacttttcttgtgtgtccacttcagtgtgcccaaggtttgaattggaagaaagtagagacagaaggggtgaattgacattctacccaaagacatgtggggcttattccaggataatattttaactcagcgtttcatcttctgccctctcttgcctccaagtttcagaattctccgtcttctttcttccttttatctttctcccatcttccttttccctttcctccattttgcttttcactgtcactgaagtcagagcagagccagagtgttatgacaataggctagaaagagagaagagagatacaccggtgtttttattccaactctatatcttttttcactctcccttccagcaagtgttgaatgttaactatggaaaagacacacatacacacacacacacacacacacacacacacacacacacatgcacagccttattctgtgccagagcagaactctgaaaattgctgccaagtggccgtcacccaagagaccatagaattcctggcaccaggcagaatctgtggctgtggccaagtgattgttgctgaacttacctgtgtcgaa

SEQ ID NO: 13894 - DNA, 2586 bp, Homo sapiens
cacagcataactttgcatgcttcttactcttgtttttaattacctctttatttcttggtattttcctgtggttttttttttgttttttttgtttttttttgttttatgtaaggtctcatgctgtcacccaggttgaagtagattggtgccctcatggctcaatgtggccctgaattcctgggccgaaccaaccacctcagcctcctaagtagctaggactacaggtgcacaccactgcaaccagttagttttttattttgtgtagagatggtgtcttgctatgttgccaagtctgatattgaactcacggcttcaatgatcctcctggtgtggccttccaaagtgttgggattacaggtgtgagccatcgtgcccagccttcctttctttattgtgagtcagctaggcatttaaaataatttttgttatattttatctagcatgtctaggtatttgaagagttggaattttcaggttgtcatcatttgccattttgccagaaccaggaccttgttacaagctcatggtaaaaggttcaaataatatacaaggacatatgatgaaacgttagtgtccttatcctcttagatctgcctaggcctcaaatcaccttgtcagtaacaacaacctttatcattttcttaggcatggttctagaagtactttttgcatatacagcatatgtatgtgcacatacgtaatacatgaagatgttttgtgcaagcagaaatatgttttactatctgcactgtacttagcaatgtattgaggagctcagtgcatactggtgcacttagttcttcctcttctttctcatgactgtatagtattctatcatatggatgtatcataatttactaacgtcctgtattattggataattatgttttcagttattttgatcttataaactatcctacaataaacattcctttacatatgtctttgcttgtatatcatttagcataattcacttcgtctgtttccttctctcccctcctccgcctgccaccactatgggttacttgtggtcaaggactttatctttcattgatgatcctagtacctggcatggggcctggcactgagctggcacttaactcacgtttgtttcattaataactgtgctcactacaaagtcagatcagcagtcagactcagtccaaatctccagcaaatgtattttaattgcagtgataacaacagctattgactgttcagttgtccgaggttattgactgagtgcctcctctggactaaacatgagctcatgcaatctttactacaaccctatgagatggtaaatttcatgatcatgctttacagacaaggaaactaaaatgcaggttacctacctgtaagagggagagtccatatatgaacacagttttgtgtgaaattaatgcctggccttttgactactctcttaattaacaattgtactggcatagccaacatgggacatatttccattgttcattcttttgtgtattcattcattcaatcaataaacaaacatttactgagagctcacgacgttccaggtagggagtgatatgtcttgataaaaacattcctacctaggtagaatttacagtgtaaagggagtgacagattaagcaaaaaagtgaaaatgtgatgagtggctgaaaagagacataagcaaaggctttaggagcaccaagagcagagagccacgaaggcctccagtgtctgtgataaactggatgagccttgaaggacagcagtgggttgaggggggcacaggaggggtgaagcctaggattccagcatgccccctgttccttgtgtgcgtggcacagtcgaatctttctcttccagccactgccagctctcaggacctctggtgtgagggccagagagcctgtgtccttctgcttttgaaaggtggctcagcactccattagccctttctaattttaaagtagtagctcccttgattgaaatctcaatttgggaacaggcctaggattggcctgtggctcgagattttcaccaataagctgagtgggaggtggggaggtgtccctttaagcagccgggaggcagcccagagagcttggagctcctctccccaggacctgagcgattttcctggatccggagctgcgcacagagcagctgccgccccaggaatgttacctgccttgtgcggagcccctgcagggcccccttcggctccgggcagttggctgccgacgccccgctgggttccttagctgcggccgctacccctgcccctgggtctccaaccccctttccccggctcccccgcagtttcccgggccggcagaggcgccgcagcgtcggagcaatgcaaggctaagccgggtaagtggcccccccatagccggggagcacagagggcggcgcaggggcatgtttgctcctggtttcaggagctcccctgaaaaaggggccttgcagctggaaactaagctctgggagagatgcgctttgccacccagacgctgggaagtcaggagccccgcggtggggacctggtgaactgagggtctgagtgtcagccacctttcgcgcagccactttattaaccagcaatgg

SEQ ID NO: 13895 - DNA, 2533 bp, Homo sapiens
aagactaggtggaggaggtttggggcaactttaggcgttcagtttaaagtttgagatctgtagtgtacaaatgggaatgtacaggaagcagttgcatgtgtataaaagtctggtgtgggccagccaggtgtggtggctcacgcctgtaatcccagcactttggaaggctgaggtgagcggatcacgaggtcaagagattgagatcatcctggccaacatggtgaaaccccgtctctactaaaaatacaaaaattagctgggcatggtggtgtgcgcctgtaatcctagctacttgggaggctgaggcaggagaatcacttgaacccaggaggtggaggttgaagtgagctgagatcatgccactgcactccagcctggtgacagagcgagactctgtctcaaaaaaaaaaaaaaaaaaaaaaaaggtctggtgtggaccaggtgccatggctcacccctgtaatcccagcactttgggaggctgaggcaggcggatcgcctgaggttaggagttcgagaccagcctgcccaacatggtgaaaccctgtctctactaaaaatataaaaactagctgggcgtggtggcaagcgcctgtaatctcagttactcaggaggctgaggcaggaaaatcgcttgaacctgggaggtggaggttgcagtgagccgagatcgcaccattgcactccagcctgggcaacaagagtgaaactccatctcagaaggaaaaaaaaagtctgatgtgcagggaagtggtccagactgaagctgtaaatttgagttatcagcatctattaaaaattggtaccaaaggccttgagactgaaatgagatgaccaagggagtgagaagtccaggtgctgagcagtgctttctggcctgcaagaactgccgccctcttatttagcctggcatcaacctcacttctccacagtgatggtgatgaatggtggaaacttgggtctttcttggagttcacctaatatgtttctgtttccacaggccaaagctgtcttgaaatttatcgagggcatctctgaaaagaccctgaggagtactgttgcactcacagctgctcgaggacggggaaaatctgcagccctgggattggcgattgctggggcggtggcatttgggtaaggggattcagtcccccatctttaggaactctgggctctgtgggggtagtgtgcagggttggggtcagaggactggtatctcacgttcctagttctgagttctgagtgggttcagtgtgtgatttctctaggtcttgatttcctgccaggaaacagcagcactgtttccccaacccaccctaaaggtgcatgtttacttgtgtgtacacacagacacatatataccagggcctttgtaatcactatttacagttgaacaaacatgcagaggcaaagaaatgggagtaagaaactttacaactcagggcatgagaatgtgtatgaccagccttgctgactgagaaaagtacaagtttgacattttaatgattttgattaaaagaagctttctttggcttctgaggagctggttttaggtgtgatgttagtttctgtttttttctactgggtttggaagatacatgcagctgccaatagagtatgttcttccaacttctcggccataataatgaacctagaacttactgtgtttgcctttgtgcattatcttccttggtgctctttagagctctgtgggcattttatagatgaatcaacctaggtttggggagttccagtgatttacccaagatcccccagcaagtcagtgctgatagagctggggcttgagcttagctcctgactccttgtccttcgttcttcctgctgctctagctgtaacagtcagcctcttagccattagcatctgctgttagcatcctttatactcagcaaggcaaagctaacttggaggttagctttggccttggcctgagcaccgattgagctccccagcttcaccatttgaaagcgtcagcacagctagtgatgagcatgaaactacttcttgtagcagtgcactggattgggaagcagtctgtctgttctgcacaccgagggcgttgtctccacagtgcttctaagcagcttgctttcacagatgttggtagctaaatgtctggagttgctttactttccttcccaaaaggtgtcctgactttttcccttgctgttacctctggttatcacctttgggacaggagcaaacaaaaatattttcttttttaaattgtttctttaagatgttcctaatttcttaaaaatccttcttttattttgttctgtaggtactccaatatctttgttacctccccaagccctgataacctccatactctgtttgaatttgtatttaaaggatttgatgctctgcaatatcaggtaggaaatttggattaagaatttttattttggacctggtgtggtggctcacgcctgtaatcccagcactttgggaggccgacgcgggcggatcacctgaggtcgggagttggagaccagcctgaccaacatagag

SEQ ID NO: 13896 - DNA, 2515 bp, Homo sapiens
caggagaccaagatccagaaagattttgtcatccaggtcatcatcaaccagcccccaccaccccaggactgatgggcccacggacccctgggaagaggccccgcctggagcactaggcccccaccctgctgctgccttccagtgctgtcattttcttcaggggccctcccctcggtgtggctggtgggtgagccgtgaagggaccctgcctttcagggcactacgcgccaccagttcccggtacccagggagcaggcagccacacacgggccttgcaaccttgtcagagaaaaggcgaacagggccctcaccctgcctgtctcccgaagcaggttcgagccacaagggccaaccaggaggcccctggagcccagatctgtcatctggtgctgccagctgtgctcactctggttttctgctcagggtctgaagcagctgctgtctccctcctctgcccccatcccctggctctcccctgggcacagtgccactcccttggaagggagggaaccacccgtgagccccagggcttgggaagcctgaggcgggcctctgcctctccctgcccccagcacaattggcagagatgaggcgggtggtggacagctgggctgtcgtggcagggtctgcacagggccatgtcctggctgtaacccaggcagtgggaggtctgcagcctggtcatggcctccacagcaggtccctgtggacagacatatctgcatatttatcaataaagccttttgctccttctcgcttgcctggcatttgactgaattctcctgcagctctgtggggcccctggagctgttctggtatgggaacaggtggatgcctggcctccccagctgctctgggcatgcaatctccagcagagtgagcctggaactgccagtcttctgggccctgatcccagctcccctggtgtcctcatgagtcctcaggaaaagccactctttgcttttctttaaagcagagccatgctgcctgccctgcctcctccatcagttgctgggaggattaagcaggaagacagatgtgaaagtgcttgcaaggcgaagacagcacctcaggaaggtggtctgctcctgcagcaagaggggctaacttccggccctggagacgctgtagccatcgtgatgttaaagcaaaatctctgacagatttagatcgtgtgtcagaggtttgtgtcagcttcccagcaagggaaccagaaaggaaaaggaaccggttcctcatgcttcctaggggaatgcatgcatatctgaagagaagggaatcttatataaggctgtttagctaagggcagccaccagccaggtgagccttacagaagcacagggctgggtgtctgcagttccctagcagattaacctgggtcacagtgactcagagctccagcatgcgagttccaggtgtggaactgagcaagtacagatctgcttttgctccacttgggagtatttttccttcttagtgagcatgggcagcctcctggccagggaagtctggcactgtctgggcctgacagggaaaccctgggagggtagaaggatccagagtagctgctgttcctcgctagctgggcttagtgctttccggagacccctttcttgaagcaagactctgtaagccctgcagaggtcccctgagcacttaccaagagaggagacagattggataaggtttgttcatgactaaaagtcacccagccaaatgcagtgatgcttaacggggaagcatgtgggaccccggagagccgaaggccagcgtgagctgtgatcagagagggagacagctgcccttcctgctaccacggccctggcctggacaagtagagtgtgaccctcctcacagccagcagggcctgtctgcaggacagcctgggagtacagaactgtcctgggtcccccgtttggttttcaggccctcttcctggagctggctgagcagggtttccaggcatccagcaggtggcactgtcatctgggctggagcatgcagccagcagttcccttttgcaactcagttgccttggctaaggcccaaccagtcccaagtgctcaggacagaggctggacgggctccttcctgcacccctgctcttgggacacagtgccctccggctctaataggccaggagttgggggggcaactggctctgctccctggccctggctccccctgctccctggggctgcccgaggtgaaggtgacaggtgggggaggcaggtggagaattgggccagtgagctcatggcaaaggcgcccagctgggcaggggtgggtgctctggcctataaagcccccgaggccctgtggcctgcagaggcggttatggacggcaccatggaggactccgaggcggtgcagagggccacagcgctcatcgagcagcggctggcacaggaggaggagaatgaggtgcgagcaggggtggaggtgcccaagggggtctgaggagatccagttctgctgtcaaggggagggagatcctgtctgctacacctgtggt

SEQ ID NO: 13897 - DNA, 2475 bp, Homo sapiens
tcaggtctgttggctcttttaggggctgaagaaggccgagttgagaagggatgcaagggagggggccagaatgagcccttagggctcagagcctccatcctgccccaagatgtctacagcttgtgctcctggggtgctagaggcgcacaaggaggaaagttagtggcttcccttccatatcccgttcatcagcctagagcatggagcccaggtgaggaggcctgcctgggagggggccctgagccaggaaataaacatttactaactgtacaaagaccttgtccctgctgctggggagcctgccaagtggtggagacaggactagtgcacgaatgatggaaagggagggttggggtgggtgggagccagcccttttcctcataagggccttaggacaccataccgatggaactgggggtactggggaggtaacctagcacctccaccaaaccacagcaacatgtgctgaggatggggctgactaggtaagctccctggagcgttttggttaaattgagggaaattgctgcattcccattctcagtccatgcctccacagaggctatgccagctgtaggccagaccctggcaagatctgggtggataatcagactgactggtcccactcttcccacaggcctcagagccccaactttgttccctggggcagcctggaaatagccaggtcagaaaccagctaggaatttttccaagctgcttcctatatgcaagaatgggatggggcctttgggagcacttagggaagatgtggagagttggaggaaaagggggcttggaggtaagggaggggactgggggaaggataggggagaagctgtgagcctggagaagtagccaagggatcctgagggaatgggggagctgagacgaaacccccatttctattcagaagatgagctatgagtctgggcttgggctgatagaagccttggcccctggcctggtgggagctctgggcagctggcctacagacgttccttagtgctggcgggtaggtttgaatcatcacgcaggccctggcctccacccgcccccaccagccccctggcctcagttccctggcaacatctggggttgggggggcagcaggaacaagggcctctgtctgcccagctgcctccccctttgggttttgccagactccacagtgcatacgtgggctccaacaggtcctcttccctcccagtcactgactaaccccggaaccacacagcttcccgttctcagctccacaaacttggtgccaaattcttctcccctgggaagcatccctggacacttcccaaaggaccccagtcactccagcctgttggctgccgctcactttgatgtctgcaggccagatgagggctccagatggcacattgtcagagggacacactgtggcccctgtgcccagccctgggctctctgtacatgaagcaactccagtcccaaatatgtagctgtttgggaggtcagaaatagggggtccaggagcaaactccccccaccccctttccaaagcccattccctctttagccagagccggggtgtgcagacggcagtcactagggggcgctcggccaccacagggaagctgggtgaatggagcgagcagcgtcttcgagagtgaggacgtgtgtgtctgtgtgggtgagtgagtgtgtgcgtgtggggttgagggcgttggagcggggagaaggccaggggtcactccaggattccaatagatctgtgtgtccctctccccacccgtccctgtccggctctccgccttcccctgcccccttcaatattcctagcaaagagggaacggctctcaggccctgtccgcacgtaacctcactttcctgctccctcctcgccaatgccccgcgggcgcgtgtctctggacagagtttccgggggcggatgggtaattttcaggctgtgaaccttggtgggggtcgagcttccccttcattgcggcgggctgcgggccaggcttcactgagcgtccgcagagcccgggcccgagccgcgtgtggaagggctgaggctcgcctgtccccgccccccggggcgggccgggggcggggtcccggcggggcggagccatgcgccccccccttttttttttaaaagtcggctggtagcggggaggatcgcggaggcttggggcagccgggtagctcggaggtcgtggcgctgggggctagcaccagcgctctgtcgggaggcgcagcggttaggtggaccggtcagcggactcaccggccagggcgctcggtgctggaatttgatattcattgatccgggttttatccctcttcttttttcttaaacatttttttttaaaactgtattgtttctcgttttaatttatttttgcttgccattccccacttgaatcgggccgacggcttggggagattgctctacttccccaaatcactgtggattttggaaaccagcagaaagaggaaagaggt

SEQ ID NO: 13898 - DNA, 2406 bp, Homo sapiens
tctgtagagggtgaaacccagaggccaagactgggaggagggttctgggctttcatccatactctctagctcctaacattgcccagaggtgggccaccctgcctacccatcagcctccccctgcccctctgccaaatctggacataattatagtaattatactgcatataaacagtataggtaactgcttctgagcataattacaggagatgtttacatactcacaacagcatcagagtaaatgatagcttactttccccttaatacttagatatcagggacctatccgggataattagccaaatctcagtagtgagggtgtggtaaagaccttaccgtttcccactacctgcaaagcaggaaggcacctcagacaaagcagggtcccagccaagatttcacaggacatcaagaagcctgcagagaagtgggctaacatctactgggcacctactgtatgcaggcgctcaggggaggccagcaaacacaagcgagttctttcaacctattaacaattctgcaggctgatattagtgtatcctcactttacaggtccggacatgggttctcagaagcttagtgcacagggtcacccacagcgagccatggagctgggcatgggcgctttccacggtgctacccggtcacagcagcgggccagctctgccctcttcctttatcgcctcttctcacttctcacagcttcctcttcctgggcggcctcctgcagcccctgctggccgcgggtctccgctcagttccccagtgtcaaggccgtctactgccccctccgccccttcttcctgtccctgttgtgtggctgggtgttatctctccagtagaagggggtggggtgggtggaatggggaagggtggagcacagggcgaaggccttgccaggcatcccggggtctccagctaagcgaggggccgcagggagcgcggcctcggggtcgccagaccctcggcttccaaccacccgcacacacaaaggctgccccggcatgcgcgggagagcgcgctcgcacccacggccgtgcgcacacacgcacaactgcacaaagacgtgcacactcctccatccacaccaatacactccctaatagggcccgcacacagccgtgcgccctcacatacaccacaccaccaccaccaccaccacacacacacacacacactctcacacggactcgcacgcgggtggaccccctcccccaccacaaacgccgaccttggggccctgacgcgtcccgccgcgctgccctgcctcgctgggcggcgcgcgcacacgcagacgcgcacacacacacacatacacacacgcacacaccccgcgcggttccacgcccctggccgcggcccgggcgctgcgctgctcgacgcggcgggcggcgggcggggaccgggggcgggggcggcggcggcggccgggagagcggaggaggcggagcagggagccgggagcgggctggcccgcgctcctcctgctggctggggattttccagcctgggcgctgacgccgcggacctccctgcgaccgtcgcggaccatgggcgacaaagggacccggtgagtgcagggcggccgcccggcggggggcgcgtgggggcgacctcggcgaggacacgggcgggggctccgattgcgtcctggttctgcgttcgcggccaccgcgggatctagtaccagctctcctccacccgaggtctcctgtgtggtctccccggcagggccgtgggcggggggacccaaagggcgagggccgggccgccccatgtgggccgcagctcctggcccggacacacagctcgctgacacccagcattggccggcagccgcagagacgcacgggggcaggttgacacacaatacacgcacgggcacactaacccgtggcacaggcatgctggcgcacacactggcaaccgctagcacacgctcatcacacgcagtggcacgccgtcatacacgcctcggtcaacacattcttgctgacagccttgttggcatgcacagctcacaatccaacacacaccaattctagcacaccctcgtgctggcacacacgtgtgggcatacactgatacgcacactgtcacctgcactcgctgtagcaaacactcttgctggcacacacatcaccctcactggcacacacacttgtgctggcatgtctcaccaacacagcggagcgcaaggccacaccaacactgacccccacagacacaatcagactgatgccctcaaagactggcaccccacaggcacgagctgctagcccaaggcccgctgacacacacgcttcaggccccacatggccagaagtggaaacacacacatcacacagggtagagcgccccccgccacccccagcctggggaaaacagatcgcatttcatccaaat

SEQ ID NO: 13899 - DNA, 2300 bp, Homo sapiens
taaatggatgcattcccttctctggatgccatcactcaggtctctccaacaatcccagggctctggctcagagaaccgaggggaggttggtgtgaaggctttgggcatggtgacgcgggtgagcatctgacatgagcaggtgcacttgacctagagtaggtggaacacagtaggcatgctttacctagagcccctgccacatagtaggagtgctttgtggagagtgccttgcacacagtaggcattctttatgtcaagaactttacatagagtagttttactttatgtggagcacttgacacacagaaaaaacactttatatagagcatctggcacacagtaggtgtgcattatgtagagtaccggccacacagagtcagagtttatgaagagtacccagcatccagagtaggcacgctttatgtagagcacttgacacacagaaagaacactttatgtagagcatctggcatacagtaggtgtgctttatgtagagtaccggacacatggagtcacagtttatgaagagtacccagcacccagagtaggcacgctttatgtagagcacttgacacacagtaggtgcacttgacatagatcaccaggcacgtagtaaacatgctctacatagaacatctgacacacagtaggtgtgttttatatagagcagcaggtgcagagtaggtacactttacataagttactccgcacaaatttcactttatatagaggaccgagaacaaagaagcaagattttctgtagagcgcccagcacacagtggacacacttttcatagagcacttggcacacagtacacaacatgtatacagagtacctggcacatggtaggtgtgctttatttagagtccagtacacagtaaaagaactttgcatattgtcttttgcaaagagcagagactgacacacagcagctaaagtgctagctgccagccccttcccttcactccctcctcagaatctttcatctgtccccatctaaggcccattttcctgtgatccctcctctgtccccctctaaggccttatctgacatcccatttcccagatgggaagcctgagtccaggaggggctcactacccacagttagggcaaggggagggcagaataaggactccactcagggtcccccatctctgccctcctgtccctggccccatccactcatggcccctctcagccttacctcccatctcccctctctgtcctcctatgctgaacctagcctccaggtattctcctccagcggggctctttatctctaaaatctgaccgggtaatccccagcacagttagatagtttgttcctactcctgtcagtcatgtctcgacccaggccctgggttgcctggaggcaggacttgaactcctgccagactgtgaagccagaggccaggagcttctgtctctgaatctcctaagtctgcactgagaaatggtgcatgatgaactcctggaccacatgtggagaggagctcagaacatgatctggcacaatggttggcctggccccactctcttgccacctgaactctcaagttcatgactttatctgccacactcttgccttggaagggcaaggtggctgtaaactttggggctcagagtcacctttgactcttcctcaagatcccctcccactcaggtgtgagatgttgagacctgcggatcctgtgcccatgctgtgtcaccctgagctggctcctctgcacccagctggccctacgccaggttttggttggttgcccaggcttggaagacacacccagtccatggggattggctcgaccagcccagcccagcctcgcctcccacagccttccggaaatcaggggccagaggcaaagacctcctagcagagggggagaggagggtatgtgggacaagctgcttctgataggagccaggctggcagtggcagggctggagggtcctggcctgggatggggaggggactgcccaaggttggggtgggtcaaggctgctggcctgggagactggtgatttcctggtaactggacccctggcaacctcccagtgattcaggctgggcctttttggattctaatcagcctctctctctctttccctttctgtgtaactggaggccacttggctgctggttttcattgggcatttctggactttagatctcagctcttgtttacccatctcagagccttccctgatctgcctccagcactgcccatccttgcccctttccactgtccttggagcttcctgggcccttccctgggcctcaggatcccaccctccat

SEQ ID NO: 13900 - DNA, 2298 bp, Homo sapiens
cctactgtgacaaagtctatggctgagtgctccagtctgatctcaggctcccaggatcacgtgggtatcaaacggaggagctgcaggtgagccagtcggcatctttgcaactggctcctgagaccagacgcctcgggtcacaaggatgtctgagtgtgaggtgaggtggctttcattcctgacttcatagccaacaaagtggtgactgtctatctttgaccaaacaggctcgactatcttccctaaaggagcagagttctaagctcaaccccatttgcctcccccatcaatccagcaattatttaattaacacagtttcctctataaattttatttcagatttttttttaaaatcctggcagtgacataatttcaaccatcaaggacccccgataaagtctcaggatgggagttcagtttgtaaagcatctctagttgcagcttcctggggcctgctgcacacactggccttgggcccctggcctccatccatgcaggaggggtttgtcactactccctgacggtcctcttgggctcaggcacccaaacgctagggctcagcacccagccgggggccgtggcatagcacatctgcccagatgttttcaggagatctgagtgggagccatggggccagccaagagggcagggagccccggatttgcagaagcagctgaggaaagagctggcattgctcagactcgccagtgttagccagccgatatcggtcaaggctgccccgctcgagggtccattatcccctttccccggcctcagctgtgcactccaggccataacagcacaagacctttccacaaccccagggtaagggtcagatgtggggtttccaaaagcttcaaaacttacccctctatccagctctatccagaaggacaccaggggacagagagatggacacggaggcctcaaaacaggaaaataaggagacccctccccattgttgattacttggggttacctacagaaagagatgaactgaaggggctgagcctatctgaggattaaagcacagcttttgtcaggagtccgtgcctccggtctttgttccagcgacctgaggaatggcatgcatcagaagccgcttccgtgtctcagatggggcctgggtcaagtcctgggagttgatggagcgtttcccaaatcgcaaaaggagaggagctagacttacctccccctcctgggaagtaatgcgcgacaagaatttaaactcttaaaacgattagcagcaaaggtctcatgtgcttttttttaattatcattttttaatcgaggtataatttatgcatttaaaaaatcagatcaattgccccccgggctctgggatggaaggcggtgtgcgcctgcgaaggtcagaggcccagcggcgccagggctcctcggcggagagccgcccgggtccggcgctttgctttcgccttctgccccaccgcgggcgaagccccagggccccggggagactccaggccggctgggccggggtgcgcccgccggctgtccgcgctcgggcagggtggggcgcagcgggcgtctgtcctgctagcggggatcgggcggctggacccaagagcagggcacgtgcgcagcgacgcggggcggccccgccaggagccccgacccgggcgcggcgcagggcccggcggagagcgcgcattcccgagcgccgcgagccggccgaagtcgggcgagcgcgccgtgcggcggctgggagtgggctgcatgtgccgcgcggggagcccgcccgacttcggggaggcagcggggcgccgtggccccgcggctcagctccctgccgggtcgggtgtcccagccctgcgacttccggggcccggcggctcctcggggagctcgtccacaggcagcctccggggcgagagagcgcgcggcgcgggcgccgggacggtccgcggcacgcgggtggagccgccggcgctcgggctcccgcaggggcggcgggcggggcggggtgaggcgggccggccgccctcccctctcctccctcccgcagcccgccctcccttcctccggtcccgcagccaattaggcggccccctcgggcgggaggcgtggggcgctgcataaagcggcggggagctgccaccccgggagcgggctgcgcagtgtccgggccgagccggtgcgccgcagactagggcgcctcgggccagggagcgcggaggagccatggccaccgctaacggggccgtggaaaacgggcagccggacaggaagccgccggccctgccgcgccccatccgcaacctggaggtcaagttcacc

SEQ ID NO: 13901 - DNA, 2297 bp, Homo sapiens
tcaagtccttggactgaaaaacaagtttatgagcagcaaggtcacctgattctgatcatgtgtatgctgtttaccctgagatgacaggccggtggccacagaagctttcatgaatgctgcaaagactctactatctctttgaaggctaccagggcctccacatgactaaatgccataaaaaagaacctcatgaatacagcaagaatgtgaaaggaaggaagtcacaaaaacaccacatgctcatgagggaaactccattctggacactaaatttttaaagtaaacttgttacttgtttgcctaaccttctaggtatcaaattacatcatcactaaaaataatccctgctttacccccaacacacccactggccatcaagatctgctgcttagaccagaccatgcccacagtcaggaaataatggcagcccagacccatgcggctccccagctcacatcagcaacaagtgccagccaaaggacctgaactctgaccacagggatcagctccatgatcagggaaagagggtggtcatgaagggcttacccatctcttcctttgctgacaatcttcacttcaaagtaataaatgccacaggcagcaggtatggggtgggtggcacgcactgaggccgcatctttgtgatttttgccatgacctaacaggagagggcaagtaagaaatttcagcagaaggaaatgcaaatggaagcctcatttttctctgcaactcctccatgacaactccactcctctgtggccagaggacgcacttacacaggccgaggaatcattagacaactgaataaacacttaaaccttccacctttgcctcacctcctcctgagaacagcagtcctgcctgagacactgcccatacaaacaaaacaagggtagaggcaatgtgagagatactcaagtgctgctggcagcctctctagaatccaggcagcccacctgggaggccaggggaagaaggatgaggccgacctggaagacaccccccaaactctagcacggaaccccaggctcagtctaggatgcctggcaggtggggaagcccatgagtctcacgctaatggtaggtatgtgaccacccctttcttctaagcagtggcgaaaggtcccgctgccgttggcgccagcctaggataagcacggaggccctggagtggaaggtccggcccagcactgggtttggacacctgttgcggttctcttgacggcaggtgtctcaggacagagaacaggcagtcagccctcggcctgttcagcctcaccaccctggacatcctgaaagggccaagccctaacttggagcacctaggcagggaaagggaggtgatagggcgggggcctggcagcagagccaccccacggacgctctagccttaattccccccagcctgacgggccgatacctttgtagtggacgcggaggttgccctgggagagaccaatgtagttgtatttgtccttggggctccaggagcgcggcagcggagtctcttgctggttgaccgcgggatacaggcgctgcaagcgccggctcagctcctgctccccaggggacggcagcccgcccccagcgcccccgccggaggagtccccaggctgcgggttcccagctcccgggtctgccgtcgctgccgccatcttggagggagctactattgtgtcactgggggcggggaggagcgggaccagatccgccccgctcagccaatggcccgtgagcctccctgggccgcagggaaaccgagtccgagtccggcacccctctttggacactgacacgccttaccacatttcgaactccataccccacaatgcagagctctcgagaggcggagcaactcgggctggtagagaattctgggagatgtagtataaccgtcctcagccataagcctgtcccatcgagacgtcgggacaccgaaaactaccattcccgccggcaaagcggctccggcctctcagcacacttccctccccatggcctctgttcatccccctgcctcagttctggtacctggggtcaaatcggctgtagtggttgactctcagggcacccgctgccgggtcccagtccacctttgctactttgtcctactcccagcccgcgggcgctaggctcgggggcgtggcgcatccctgactccgcccccgccgcgggggggcctctggggcctggtcgccatggcgaccggctgtacgctaccacagcttcccaggccgcgggtgctgattgcccgcctgcccgtgggtcatggcctgccagcagtcgcggtaccacag

SEQ ID NO: 13902 - DNA, 2295 bp, Homo sapiens
acacagaagagctgtgtggtgggcccagtgctgagggcttcgtggccctgatttgatcttcacagtagccctatgagacggactgtccccattttagagatgagaactgaagcacagacagcgttagaagtttgtgctgtttttgcagtttagtgggaggctagcccagtcctgcaccgcgcccgtgcctggaactaccatgccctccctgccacgtacccccgggcagggagagggcagggttgtttggtggtgtgagaagcagaagagttccatggctgggtccctcgttcctcatgtcaggaaaaaactatatcccattttcccatcttggagggacttaggaaaaacagttctccagcccaccttccagaagttcacctgagcctcccgtctttcactccatagggcccggctttgggatgagcagtgctgggcctggcttcccccaggcagtgccacccactggggcctttgccagctccttcccagcaccgctgttccccccgcagaccccgcttgttcagcagcagaatggtaagagctgtagatggacaaaccctttcaccccatcccatctctgcatagagatcagttagttgttcctccgacctcatcagagcccatgcagtgccctttctgaccagcaggggggaccagggaagcaccagacccgcccgggtacttccactgctctgttcccttactcccccagtttaggagggccccccttgctgtccgcctgcaggaaggcaggctggtgtcagctgagtgactgctctcgccccctaggctcttccttcggggacttaggatcagccaagttggggcagaggccactgagccagccagctgggatctccaccaaccccttcatggtgagtgtgccagcaggggtgctgtggtagggctcgtgggctttccctctgggacaatccttccagaagaggctgatgtgaggtggcccctgtgccccttcctcgtgaaggtctgcgttgtccaagccagggctgagcttgggcctcagctcttctgggcactggcatctcccatgctgttccagccctgcccttggctcccttctccctcactttccttttttttttttttttgagacagcctcactctgtctcccaggcccaatctcagctcaccgcaacctctacctcctgagttcaagcaattctcctgcctcagcctcccaagtagcagggactacaggtgtgcaccaccgcacatggctaatttttgtatttttagtagagatagggttttcccgtgttggccaggctggtcttgaactcctgacctcaggtgatcagcccaccttggcctgccaaagggctgggattacaggcatgagctaccgtgcctggccttttctccctcactttcccactgccctcagcatagcgatttttcaggagaaaggactcctggctgcctttcttctaagcttccagttcctctcccctaactggaaaatgtattgttctttctttccagactggaccctcatcaagcccattcgcctccaaacctccaaccaccaaccccttcttgtagcactgtgtttttggggggcctcttccctgccttctggggcccctctgctccctagagctctggtgaccacttgcctgtgggcatttctatgggccttggggatggtggaggtgctaatgctttgcttggggcctacaggtgaaaggtggctgccctcagattccacaaagcctctctcccctccctcgtcccacccccacccaggcaggaagcccaggaggagtgcgggcagggcctgacctggaggagtgatggttgagggggagggatttttttcaaatgatcagtcccctgtggaacagctcttccctgggcctagctcgccagcgctgtgctcctcatggacgggagcgcagtggggaaggtaggggaaagatgaggcacagtgttgatggggcagtgaccagacagtcctgagacccagaaggcccaggtggcccaagtgctcttggtggcccagcttggccagcacacactttcctcctgcagcaccccctgctgaaggggtcccccattgttttgcttccccagcgcccaggatgagcggtttaccatcgagcttacccgggcccggctcctgtcaagcactttagttagctgttggtgtcatgtttggataccagtgttttatatttatacatagagaggattttctaatatagcctattatatataaatagatctatctatatgcacatacatacatatatacacacacccagccgatct

SEQ ID NO: 13903 - DNA, 2284 bp, Homo sapiens
tgaactgggttttctggtttcatctcccttcagatgcacagacttccccatgacatccatgccactgagtgctgggcctccctcactgtctcaccccctcaccctcaggcttttcatacctggcagtgctgaccgtggccatccagacctgtttagagatgcagctttctccagcatccacccgctgctcctggtttggctgctggaggccatcaagaacaaatctaatcccttctgacagtcgtattgagagacaagacacctacccattccccagtcattctcttcagcccatgctcaacgccttcagattcttcagagtctctgaaaatgtgataatgaggctactggtcattgccggtcacgcctgtcctagtgcttgccattaccaaagttgctttttgcttgctttctcttttttctctcccccttcatctctttttctgatggacacgcctgctagctcgcctgcctgcagtctatctctctgccctcctgcatggtcctcacctccccagcaaagtctccctgctttcccctcaaggtctctcctgtcccccaggggcctcccacctacagtgcatctccctcccctgccccgctcccccatttacccccatttcttcatttctcctctttcccgtccaaagatgcgtgtagggtggctagtcaagaattgcagtggaagagtgttttttgttttttttttctgagacaggatctcactttgttgcccaggctgaagtgcagtggcatgatcatggctcactgcagccttgacttccctgggcttaggtgatcctcccacctcagactcccaggtagctgggattacaggtgcgtgccaccacgcccagctaattttttgtattttttatagagatggagtttcactatgttgcccaggctggtctcaaactcctgagctgaagcaatctgcccaccttggcctcccaaagcactgggattataggtgtgagccaccgtgccctgctgggagctccttaaatgtggtcctccacatttcttgttgtggagcccaggatctcattagttcttggcagctttctgatgccagagccctaaggcttgttcaaagcccttattgcaaaaattccatctccagctcacccacttggcctggtacataccgctcttcattgtatagttcttttggctccaagaacaaaacactggatttgtccttgttttatctgacctgccatctctgtgtgttatgctttgtccactcccaatttagtctctgagtcagtttgccctcccttttaattttatgtcatccatagtcttgatgagcaaagtgtaccttctgtttccattaatcatggaaattgctgaaatgggatgggggatgggggatgggggatggggtagggaccttataagccatctggttgaactccttcattttgcagaccaggaaacagagttccagaaaacaaaagctacttgctcagcacgacccagctatgggcacctacatagagctaggttcagaaactgggcttcccggtgctgggagggtaacatctggttttgaagatatttgaattcaaaccaaaccacagtggttgtgtgtccacaaccaggaattaacattaagtgtggacaaaaaaaagtgctaccctctggctttggtgatggtacaattgctcatcattttaggagtaacttttaataagggggcagatactaagtaaattattaagaactgagcttgaatacagttagaacctaaagagcagaacagtcagagaaagaacagatagttcagttgttctttaatttctgctctgttaccctctgcatggaagccagaatcatattgctagagatgtggaggaaacccccacaccccatgtttacctggggcatgtcactcccttgctaagcctttccccagatgtcccaacaagaagccagctgactgactccaagttcccctctgcccgcctgcccagagcaggaggggccgataaagtgaggtgggaggcctggcagaaacaccgaagtccagatctgctgagcgcgcctcctctgcttggcccgtggatgtggatttctagtgcctggtgcatgtagctctcatggcctggcattgactgatgatcagctggcttggggtgaagacgagtgaccccttggggttagtaacatggtctcccctctttccccaggttctacctacagcgtcctgtccaccatgccctcagactcagaaagcagcagctccctcagcagtgtgggtgagtaccactgtctg

SEQ ID NO: 13904 - DNA, 2240 bp, Homo sapiens
ctctgccaacacaatggacaatggcaactgcccacacactcccatggaggggaaggggatgagtgcagggaaccccgaccccacccgggagacctgcaagcctgcagacactcccctcccgcccccactgaacccttgacccctgccctgcagcccccgcagcttgctgtttgcccactctatttgcccagccccagggacagagctgatccttgaactcttaagttccacattgccaggaccagtgagcagcaacagggccggggctgggcttatcagcctcccagcccagaccctggctgcagacataaataggccctgcaagagctggctgcttagagactgcgagaaggaggtgcgtcctgctgcctgccccggtcactctggctccccagctcaaggttcaggccttgccccaggccgggcctctgggtacctgaggtcttctcccgctctgtgcccttctcctcacctggctgcaatgagtgggggagcacggggcttctgcatgctgaaggcaccccactcagccaggcccttcttctcctccaggtcccccacggcccttcaggatgaaagctgcggtgctgaccttggccgtgctcttcctgacgggtaggtgtcccctaacctagggagccaaccatcggggggctttctccctaaatccccgtggcccaccctcctgggcagaggcagcaggtttctcactggccccctctcccccacctccaagcttggcctttcggctcagatctcagcccacagctggcctgatctgggtctcccctcccaccctcagggagccaggctcggcatttctggcagcaagatgaacccccccagagcccctgggatcgagtgaaggacctggccactgtgtacgtggatgtgctcaaagacagcggcagagactatgtgtcccagtttgaaggctccgccttgggaaaacagctaaagtaaggacccagcctggggttgagggcaggggtagggggcagaggcctgtgggatgatgttgaagccagactggccgagtcctcacctaatatctgatgagctgggccccacagatggtctggatggagaaactggaatgggatctccaggcagggtcacagcccatgtcccctgcaaaggacagaccagggctgcccgatgcgtgatcacagagccacattgtgcctgcaagtgtagcaagcccctttcccttcttcaccacctcctctgctcctgcccagcaagactgtgggctgtcttcggagaggagaatgcgctggaggcatagaagcgaggtccttcaagggcccactttggagaccaacgtaactgggcactagtcccagctctgtctcctttttagctcctctctgtgcctcggtccagctgcacaacggggcatggcctggcggggcaggggtgttggttgagagtgtactggaaatgctaggccactgcacctccgcggacaggtgtcacccagggctcacccctgataggctggggcgctgggaggccagccctcaacccttctgtctcaccctccagcctaaagctccttgacaactgggacagcgtgacctccaccttcagcaagctgcgcgaacagctcggccctgtgacccaggagttctgggataacctggaaaaggagacagagggcctgaggcaggagatgagcaaggatctggaggaggtgaaggccaaggtgcagccctacctggacgacttccagaagaagtggcaggaggagatggagctctaccgccagaaggtggagccgctgcgcgcagagctccaagagggcgcgcgccagaagctgcacgagctgcaagagaagctgagcccactgggcgaggagatgcgcgaccgcgcgcgcgcccatgtggacgcgctgcgcacgcatctggccccctacagcgacgagctgcgccagcgcttggccgcgcgccttgaggctctcaaggagaacggcggcgccagactggccgagtaccacgccaaggccaccgagcatctgagcacgctcagcgagaaggccaagcccgcgctcgaggacctccgccaaggcctgctgcccgtgctggagagcttcaaggtcagcttcctgagcgctctcgaggagtacactaagaagctcaacacccagtgaggcgcccgccgccgccccccttcccggtgctcagaataaacgtttccaaagtgggaagcagcttctttcttttgggagaatagagggg

SEQ ID NO: 13905 - DNA, 2216 bp, Homo sapiens
aatgtttctatctgaccacccccaggctgctaggggaaccctacctgccaagacatccaggccctctgcctggaggctgcatactgggcagtgctgggaacgactggttgataggtgtgccgggaagctgggcgattctggcagtgcaggacacttccggagtgtgaggaaaattgcgtcattggaacaaagtgattcctcacagagaggcacaaagtccgcatcaccacagaatcaaagatgtctcattcagcgctggagctataacgttctctgatgggttttgatggttaatctcatcaagaattaagcttgttaagggtggagctaacccccctctccctccctctagtccggggaacacggtgcccggtgggcgctcaaggactatgtaaagataaagttgataggggcgtaccacccccacatcccttcacataggaagaagactcacttctgcttacggctagcgtttgctctgtttctgtggaagtcgtgcctgctccaggaagagctggatcatccattcattcatttatgcatgcattcattaaacaggtattcactgactgtgcctcagacctggttttgggtaccaaggaagtttttcaaaacctcacagggctttgtagctataaagatatgtaaggatccttgggttatctgaagcccagagaagggagataacttgtccaagagcacacagcaagttgggggcagcgctgggccagtgctctgagctcctccaaccccgcccccacccacccaaggctagatctagatctacccactcctctccttaactcttcatcggctgtactcccaccctaaggagtcgaaatccccaccctagggagagacatatcctgtctggattgtccaaaagggaatgaaaggtaaaaatgaaaaaaaaaaaaaaaagtgtccccaattcaagtgcagtgcctccctggtgcgggcattccagcgtggcctggagtgagtggcagtccacctccagaggcgtcccctgggcgctcctagggactcgaatttcccacgcggctttttgctttatgtattcactgtttagacgttttcggtcaaagcattttgggacttccgtaactctcagagcgcgccagggagccgcccttaaagatacctagttactgatgagttccatccggtaaagcagagggtagtgggcggcttggagactcaggatccgggtcccctcacgctcctggctgagtccctggcttcacaggggaaactacctccgcaggccaggacccatctagttacaggatacctcgatgttacaaagacgaggcttccagcgcgggggcgtggaggcggctgccagccctgcccgcagcgtgctggcgacccccgggacgccccttccctcccgcgcctctgctccctagctggtgggagcagagcggcaccgggatcacttccaggtcccttgcaccggaggaatgggcggcagcagggtccggagtcggcccggcggggcccacgtggccagcacatcggtcctccgctcgcgatttcccttttccgctctcgggcacgaggtactgaacgccaggtggaagcacagctgtgcagctacaggctctgccgttcagctgccgcgggccggggccggggcctgcggcgtcgtgcgcgtgcgcggaccagttccaggcgggcgagaccgccgcagggcggggcggggcgaggcggccgcagggcggggagggcggggagaggcggccgcagggcggggagggcggggcgcgaagccgggggcgggggccacgcgtggggcaggcggtgctcggctcggctgacgtcggcccgccggcgccccaccagctccgcgcgggcccgggttggccaccgccgggcccccgcccctcccccggcggtgtcccggccggaaccgatcgtggctggtttgagctggtgcgtctccatggcgacccgccggtgctataagtagggagcggcgtgccgtggggctttgtcagtccctcctgtagccgccgccgccgccgcccgccgcccctctgccagcagctccggcgccacctcgggccggcgtctccggcgggcgggagccaggcgctgacgggcgcggcgggggcggccgagcgctcctgcggctgcgactcaggctccggcgtctgcgcttccccatggggctggcctgcggcgcctgggcgctctgaggtgagggactc

SEQ ID NO: 13906 - DNA, 2204 bp, Homo sapiens
tatggcaagggccatataagaaagtacagtttgaaattctggaagcacaacaaagtgaataacaccagctaacacgtgcaagtgcttgctatgtactacacgccattacaaagtccttacctatgttacccccatttaatactctcaacaaatctacagggtaggtaatattattgcccctatttccctgtaaactaaggcacaggcaggtcaagtaatttggtcagtgtcacatggctagcaagtaccagtaaacgattattttgttggtaagtatatgagagggcttcctggaatagagaaaatgaaattctaaacccaacacaagatctactaaattagaatctctaaggttggactcataactttaacgagtttcctaaagtgatttctgcacacactggagtgtgaagagccattacctaaaggaattaaaagttttccaaaatgaagaaaaattgtgcaaagaacaatgtcaaaaggtaaaaatgatcatcaaaaatacttaatgaagttttatatttagtctaaaagactgggaaggaagatgagaataaaatttgggttcccaaatgcaaaacaggcttatacaggaagaaataacctttgtatagtcatagtgtttcttaaagaacagaatagcaaaaataaaaacataggacacattgggctcaagtacccacagtgtgttattttctacctctatgttggcctatgtagacatttgtcccttaaaattatcttaaacttgagaccatcctggccaacacggtgaaactccacctctactaaaaataaaaaaattagctgggcgtggtggcatgcacctgtggtcccagctactcaggaggctgaggcagaagaatcgctagaacccaggaggcggaggttgcagtgagctgagatcgcgccacttcagtccagcctggagacagagcgaaattcctactcaaaaaaaaaaaaaaaaaaaaaaaaattcttaaactactacttatccggagaaaaacaaggtattttaagactgggaagggaaagaatcttccttcaatggttttggaaatgaaaacaccatttaaattcaaggaaataagttaattgctgatagattattagcagagtattttcatgtagatgtaaaatgttattttgttctctgaaatagtatgtgatctatatacacttacttttataataatacttcattacaaaaattggactagggagaaggaggagacactataggtacaatgccatttggctacactgaaatctttcccaggcaatttcataggactatcaccagctattgagccttcttccccattactcactggtctaattggggagaagaggaattgcaaagagggcagaagaaagagtctgttctagtaggaggttattggtagatcagacttgctatgtcccctttagcctgctaaattttctcatcattgttaccagattcattgtgacagttacaggcaaatttcatgtgttgttggaaaaacgctcacaagtaatacgctagtttatttctgattaataagactgtttactatatttccattctacgggtacacatttaaacaatccattatttataatgaaattatagtgatactttttatatggttcccttttaataccaggttaaatactctagagatttagggaattaatggaccgtcatccaaatgacctcaaattaagttaaatgacataaaacataggtggagggttttggaattgaaagtaaggattggaaaccccaaattttacactatacaaaagaccaggggcaaggaggcgctttaagtattttagattatatactgacaaaactcacccctcccaacaaacctgctgaacaggtgtttggagtcaaatgcttgacttaatcatattagtgaagattaggaagaagctttaaaatcccaaggctagtgtgcattgctagaattgttaagagagagagctcatatgaaattggttatcgtgggatatttaaaataaaacaaagaacagtttactttgtaagttaagagctgagggaattgttggctaagactgacttgaaataactccagcaattcatgcatagctgctaaccttctacatcttcagcaggcaaaaagatgccagtaatcaatattgaggacctgacagaaaaggacaaattgaagatggaagttgaccagctcaag

SEQ ID NO: 13907 - DNA, 2203 bp, Homo sapiens
gttttctcaagtgtgtctggcctgttttgagcatttcatccggagtctggccgccctgaccttcccccagccgcctgcagggggcgccagagggccggagcacggaaagcagcggatccttgatgctgccttaagtccggctcagaggggcgcagcgtggcctggggtcgctatcttcccatccggaacatctgccctgctgggggacactacgggccttcccttgcctgagggtagggtctcaaggtcacttgcccccagcttgacctggccggagtggctatagaggactttgtccctgcagactgcagcagcagagatgacactgtctctgagtgcagagatgggggcagggagctgggagagggttcaagctactggaacagcttcagaacaactagggtactaggaactgctgtgtcagggagaaggggctcaaggactcgcaggcctgggaggaggggcctaggccagccatgggagttgggtcacctgtgtctgaggacttggtgctgtctggattttgccaacctagggctggggtcagctgatgcccaccacgactcccgagcctccaggaactgaaaccctgtctgcccccagggtctggggaaggaggctgctgagtagaaccaaccccaggttaccaaccccacctcagccaccccttgccagccaaagcaaacaggcccggcccggcactgggggttccttctcgaaccaggagttcagcctcccctgacccgcagaatcttctgatcccacccgctccaggagccaggaatgagtcccagtctctcccagttctcactgtgtggttttgccattcgtcttgctgctgaaccacgggtttctcctctgaaacatctgggatttataacagggcttaggaaagtgacagcgtctgagcgttcactgtggcctgtccattgctagccctaacataggaccgctgtgtgccagggctgtcctccatgctcaatacacgttagcttgtcaccaaacatacccgtgccgctgctttcccagtctgatgagcaaaggaacttgatgctcagagaggacaagtcatttgcccaaggtcacacagctggcaactggcagagccaggattcacgccctggcaatttgactccagaatcctaaccttaacccagaagcacggcttcaagcccctggaaaccacaatacctgtggcagccagggggaggtgctggaatctcatttcacatgtggggagggggctcccctgtgctcaaggtcacaaccaaagaggaagctgtgattaaaacccaggtcccatttgcaaagcctcgacttttagcaggtgcatcatactgttcccacccctcccatcccacttctgtccagccgcctagccccactttcttttttttctttttttgagacagtctccctcttgctgaggctggagtgcagtggcgagatctcggctcactgtaacctccgcctcccgggttcaagcgattctcctgcctcagcctcccaagtagctaggattacaggcgcccgccaccacgcctggctaacttttgtatttttagtagagatggggtttcaccatgttggccaggctggtctcaaactcctgaccttaagtgattcgcccactgtggcctcccaaagtgctgggattacaggcgtgagctaccgcccccagcccctcccatcccacttctgtccagccccctagccctactttctttctgggatccaggagtccagatccccagccccctctccagattacattcatccaggcacaggaaaggacagggtcaggaaaggaggactctgggcggcagcctccacattccccttccacgcttggcccccagaatggaggagggtgtctgtattactgggcgaggtgtcctcccttcctggggactgtggggggtggtcaaaagacctctatgccccacctccttcctccctctgccctgctgtgcctggggcagggggagaacagcccacctcgtgactgggggctggcccagcccgccctatccctgggggagggggcgggacagggggagccctataattggacaagtctgggatccttgagtcctactcagccccagcggaggtgaaggacgtccttccccaggagccggtgagaagcgcagtcgggggcacggggatgagctcaggggcctctagaaagagctgggaccct

SEQ ID NO: 13908 - DNA, 2158 bp, Homo sapiens
agtaggcaccaaacacactgtcaagacagaaataagtgagttgccgctgaaagacaactgcacctgccctatgtgctggagagggtctttgagggtttcccactggggcagagcgcagggcagtgtgggggatggggagggctggggcatattggggacaatccctgttgtgggtgccaccagcagaccacaaaaggtgccaaaggagggagtgagagggaagggtttactaggaaagtcctgccccacaggaggcttccgggagagcttcccaggaagggagcagtgagccaaggcagcctgggatgggactgaatggggcttttttctgcttccacctcattttaaagcaaatcatgttgatttgtatattatgcaggggaggagaaaacatgcttcccctctacccttctagttcgttcagctagtctacaaattaaattggcatcaaatagatgaacaggagaaaagctgttttaatgtatgtactcacagatgggaatcccacaagaatatgagacttaaagaacaggccaggtgagtgaggggtccagtgcgagggctcacacctgtaatcccagcactttgggaggccaaggcaggtggatcgcttgagcccagattggagaccagtctgggcaacatagggagacccccatctctacaaaaaattaaattagctgggcgtggtggcacacgcctctagtcccagctactcgggaggctgaggtgggaggattacttgtgccctgggaggttgaagctgccatgagccatgattgagccactgcactccaacctgggcaacagagtgagaccccttctgggggaaaaaaaaacacacgaaaaaaaaaaggtgcagcagcccgatgattgaggcttatctgtcactctgagtgacagaaagaaatgggggtttgaggcttctggggagcggtggaggagtgaggggagcgtgaggagaggaggtgtctggtgaacgcaggttgccgtgtgaggcagataaaagtttcccaggtgataaaagttgtccgggaacagctctcttcctggtacagatctgctgactaacaaacatttcctttataggtgcaaatttcctttacaaaagggcattttctcagaggtactctggtgtctgcagttcctcaacataaccagttccaaatcatcaatgtgccaaagaggactatgttggggtagcagattctggtctcctccagtcctacttggggtgatgaattctggtctacggtcctattaaattctggtgaattctgagcccccacaattgcaaacattagaaagaacctctcaagtgcccgggaacagccacgtcttcctggctgaggtgtgtcccaccacttcctcactcccgccctggccggtggtgccgagagacctgggaccatccgggggagcactttccaccggacgctggtgggggccaagaaatgccagcctaggcggactggggagggtcttgggcgtccggcgctgtgtccccgccactcgtgcttgggccagcagtccccaaggcctaccctgggtccttgcccagaggctacagtgggttccccggaggccaagacggggccggccgcctacaggagctcgtgaggtagcagctccgggggctcacccaggactccaggagcgctccccagaatccccttccttaacccaaactcgagccctcgggcagcgctgcgccgcggaccggagaggggcaggttggccgctgtggccgggcccgggaagcgccccagagtcccttatgggtccctccgcagccggggttgagccaggcagggaacccgtcccggacttcccttgggaaacgcctcctcccgccgcccccgcccccgcccgcccagggtgacccgcgacccgcttgggggtgtcgccctggaccctgggacaccgcctcctgagattaaagcgagagccagggcgggccgggccgagtaggcgcgagctaagcaggaggcggaggcggaggcggagggcgaggggcggggagcgccgcctggagcgcggcaggtgagcggcgccggtaccagggtcccggctcggggtccgggctggggaggggaacctgggcgcctgggacccgccgatgccccctgccccgcccggaggtgaaagcgggtgtgag

SEQ ID NO: 13909 - DNA, 2041 bp, Homo sapiens
ctcactcagcttcctctcctgaccagggctccaggagacctgactctgcccttgagggcccaggcaggcactgcggtcacaacctgatgactggtgagggcaaggacagggtgtccctgggagaggccccccttctgctgaggaagcagcttttccagtcaaacaatagcgctattcctggcagatgaccaagctgggccaggccaggccatagcgggagggggcaggagagggaggagcagagcctccctgggagctttcagccttcgcctgggcctggaacatcctgtcctggtacagctggggatactgaggcctagggaggtgaagggtttcaagagactatcagggtaggccactccacttcctgcctccttcccctcagccccatggtttcccactctgtctgcacctgccattgatgagatgggctcagcctttgagaagctcctccttcccctagtcctccaggggataggccaggatgtggtggctacatagtgtttcacaggaatgtgtcaagcccgagagtccagggaggaggcttagcttggcttccatctgcctatggtgggggctccagagcaggcagagggcctgcttaggcctgctgggtcccaatcaggcctgaggcctgctttagtctacttggttcaaagcctcacatctgaggcctcagggtgctcaggccaggcaagggtcccctggagcattctcagccctgcatggagccaacatggacatgctgatgcctgcttagccttgggggggtcttagacctgtgaaggcctgataagatctggggtgtctgccagtgccgggggcctccttgaacctgaagcaagtttagatgtgcacaggctagctaagggctgcaggctttggggctcaagtttcaggcttgaggtctgagtactcactgaacctcagctgcaagggcctcccccaccaaagtctgagcactgggcattactggctcaagcacttccgggttttgttggtatcgagggacctcaagccttaggccttggccacctgcagccccctaacccaaagtatgtcgctcaggcagaggtggctaggattctacctctgtgtgcccctggtgaggagccttctattttgaaagttggatgaaaggaacaagtggggctaccaggccaggtttcaatttgtcagccccctcgcaagcggggaagggtaggtatcaatcgcaatcctgtgttggcggccctgccccctgcagccatgagaggcaggagagcgaaaggcgcccgggggacagcgctgcacagcagacctgtgcctctcattgctccggggatttgggggcagcgttctggtcctagccgagctccagtttgtttcgtgtcccttctgtctcaaggacttcaatcatgaaacccacgtgtgtgccagaaggacagaaacgtcccctccgggatgctcccaccggctgcgcagctggctttccgcggaaagggcggagcccagggagggggcgcgtcaggggcggggcctggaggagtcagacggggtggggtctatccccgagccagtactaaaaaaggcggagccgttcggggcggtctcggtgggctggctggaaagcgggatgaggttctggcgttaggaggaggcgtgaccacccaataggcttctcttcccgcggggcgtggccgtcaaggagccggacgccgcgcctggctgggcgggtcagcctcgcagcgggcggcgtggacgcggcagcgcagcggctcctttaaggctcgggcaccacccccgccgccccgcctcccgtgcggcctgggtctagttggcggcggggtcgggtccgcgcgagccgcgatggagctgcacatcctagaacaccgggtgcgggtgctgagcgtcgcccgtcccggtctctggctctacacccacccgctcatcaagctgctcttcctgccccgccgcagccggtgcgcgcccgggttcgggagcgcagataggggctgggggctctgctctcgctccgggccagggtcggaggattaggatc

SEQ ID NO: 13910 - DNA, 1799 bp, Homo sapiens
gaccgtaaactgatcaccactgcatgggcatctgcctcacccacctttgggagttgggggaagagccagccacaggtgctcaggtgcaggtgcccaggtgtgagcggctaggtgcagatgctcaggtgtggcagcagggagtgcacttggctcatctgccctggggagggccagctcccgacagaagtaggccagaggtcagtcccaggaaatgcttggagcagccagcagggtagggccaagtcatgatacacctaggagtgggaggggaggcctctttggatattacctggtttatcatttagctgttggggtggggaaggaggtgggaaagacagaaggctctcccaggaattggcaggcagccaggtcagggacaatggcagcccccacttgtgctagaaaggcaggcaggacgtgaccactcagatagccacatcaacaagtacaaatcacggttgccctggaaggaaatggctcaggtttttcccagtagctcaatgcctaggcacccccacctgtggtttgggcatttcactctattagctcttctgctcagtggcccattctgctagccacagctcacatttactccagttatgaaaaaggttaattttcccatattgagtttctctgcaaaagctgctttcagttgtgaccggtaagttccgttgtcaccaatatgggtacaactgttgtcactctgctattctgaagccatgatactaaaagtgtgaccccagatcagtgtcatcgccatcaactacaagcttgctagaaagaaaactctccctagacttccagaatcagaatttgcattttaacaaggcccccaggggaatcctgttcacactgagttttgagaagctctgttctaagatattactccaatccccagcaagccaaaccgaccactttcttcacataatcagaacgctcggttccagtatttccagataccagccataggaaaacacgttgttctctcatttccctttaaccttatctaaagcactcaatttcctcaacccttaagtcgtcatctgtaaaatgggagtgctaatcctacttaatttaagatgattaagttgaataataaattagaatttgtcctacaaattgtgaatcatgatcggaatattcaattttattattactctgtgtcctaactcaataactgggttataaactcctgaaaacaggacaatctcttctctacctctttctttatcttccctgtatactgaaatacagcgttctgcccagcatgaggtcgactatttgacatttacaaaaatctctcttggaatccccctgccaaaaaaaaaaaaatcgaatttcaatttatgactccaagcacaaagagatcctgtcactttgacctaattctctgaggttcatccctctaaataattgtattgtctccatctataaagtactctgttactatgacaacgcacacataattgcatgtgtaagtagttgagggtggctgtgcaagtcagactcctttccaccaggaaacacagaaaacattctatcttcccaaatgttactctctcagatttgcaccaagaccctagaagtttcttaaatttccatatactttatggacactacaaagcaattccaggaaacactgatacagtagcaaaactactgggagtggaaattggatggagatctgggtcccagttcagagtctgacacctgatttgcaacataattaggcacagggcactcaactattcagggccctaaacccttctattgaaagggaaatgggagaacaatatgtg

SEQ ID NO: 13911 - DNA, 1798 bp, Homo sapiens
catacctagaacgtttgcctgctgcagatatacagacaagatatctccctacctcatagccaccttcacccctgtcccacaacccaacacccagcccaccttcttggacgatggaggtagtcgttaatttcttggtatcattgctagctcttagccttacccttggtctttcaaggaaaaaaaaatgcctgatactgtcgttaacagtttaatttatgactatttgcaaaatgtggaggcctgtgtggagaatgcaaatcgcctcacaaagagataaaggttcctgttatctgattcagagggagacacacagttccgaggatgccgagggaaggagtcctgtgcaaacagatcttttagttcctgtccacagacacctctacattctgtagacatgcagagtcctagatatacatatgaggaggttgcatgtgtgttctggttcttggggtggaggtggtggtggagattttcgaatatctgttttaatgactcacaatatgcatatgttaaccccagtcttgtatggggagccctgaaaggtcaggtcacaacctgaaccgcctttaccaagaagcttctcatttcaaaggcacttactgtattttcacgtatcaaaaaagaaaagtgttttcctgaagataacagggaggggggatgcttctcggagggacctgggttttaaaaaataaaggggggtaggagaaaaagggagagagaagaaaaagggggaaaagaaacagctcaaatgaacagagagatcacggtttgcatggctgcccttcaataggctaaactgacaagatcagttttaaagggccacttaaatcagtttcaaagactggagaaaaatgagtcgccctctttggggggaatctgaggctggatcgtggacgccattactcgggactgggccaggttgtccacccccaacccccaacccctatataattataagccaaactattatttacagaggaggaggggagagagtgctggtagttttggtttcttctgtttactgacttgggccagacagacccaatgcacttttgcttgggcctctcaatgacccaggctaaggactcgggcagtgaaagcctgtagcacactgagctatgttttattttaaagcaaacacttcctcaggaccatctcttgctctttcttcccccaccccgcctcccccccttaagttttcagtacatagacatttgctccaactccggttggggcagtttgacagagctctgtgcacacacctcatgtgacccaattcaaacctcttaatctgatgactgaattcttcttcttcttcttcttcttctttttcttcttcttcttcttctgtttttaaactttcttccagatgcctgtggtctctctgatgtagcccatgtggaaagcttgcaggaaaagtctcagtgtgctttggaagaatacgttaggagccagtaccccaaccagccgacgagattcggaaagcttttgcttcgcctcccttccctccgcaccgtctcctcctcagtcatagagcaattgtttttcgtccgtttggtaggtaaaacccccatcgaaaccctcatccgggatatgttactgtccggcagcagttttaactggccgtatatggcaattcaataaataaataaaataagaagggggagtgaaacagagaaagaaaaggcaaaagactggtttgtttgcttaatttccttctgttaagaaaggatataaaaggatgttacaagtttgctaaaagaagagaggggaagaatttaatggactgtgaatttca

SEQ ID NO: 13912 - DNA, 1792 bp, Homo sapiens
accaccattctcggcttatttttgtatttttagtagagacggggttttgccatattggccaggctgatcttgaacttctgacctcaggtgatccgcccaccttggcctcccaaagtcctgggattacaggtgtgagccaccatgcccagcttcaattacgtttttttagctgatttagtgtactgtgtgtgtgtcccctctttccctgcctgtgcctgtcataggaagacccaagcccaccttccacccaagacttggaaaacagcttttctggatgtcactcatgtttgctgtcctctggctttaccttatccagcagcacagcagtgtggagcaataaaggaaagtgataaatcagcatagagagcgttatccccaacctcagatcacacagtccttgcaaccttaaagccagacaaaatctgagaaatcatcttgtacttctaaagcaaaatcctttccatggcgtctctaagagctggctctccggcctcatccagactctgcttgcatacttccattcgtagagatcttcatatttctccattcagtcactggcagcctaccttgtgccaggagctgtgtcagttactttctcatatataatttaatcctcacaacacactgtgagggtgccatgccatagccatatcacattcttctccatttgacagaccagaaaaccgatcattcataagtgtcatgatgttagatcatctgactccaagctagaagggatgggaagcagaatgagggctccagccccagcatcttttcctccagggcacgacttaggaatatagtcttaaagtactttgaaataatcttcttttaaatctctgaaagagcagaagtttagaggtcaggcagacctggtgttgaatcccctagcagcttgtaagcacctgaatgtctggattctgtcgtctctgtatccttccctgctgggcctggcattgctcctggcagtcagttgatgctttttgattgagtaataagatatgaataatgctgtatacatgtgtggtacataaactttcccaagttattctttcgacacatagcccacttattaatgcattcaaagtactagacactatgcagagggctataggaggcataaatatgaattatagaagacttgcccttaggagctttatatctagaaggtaagctataaataagatacgtatcacaatgtgatcttcgcagtaaccccattggattggtaaagccagaattattatccccatcttataagtggagaaactgagccccagcaaagtgcagtgactgccatgagtggagtggctgagaggcagggccaaaccagagccagggaacctgcctcccagctcagctgttcatctggaggttgtaactacatagcattattagttaaaggaaagaacaggttttgcaaaccctcactgttctatagattatggtctgaaagtctacctgatattgcttttcccttcttcaaaccccatccccatcttcctgtcctctcaaggatacagtatacttgctccatcgcagcgccctcgagctcacttacattttatttatttacacgtatttctctctcctttctcctccaggttgtgatcaattattcaatcgtgaaagggctgaagtacaatcaggccacgccaaccttccaccagtggcgagatgcccgccaggtctacggcttaaactttgcaagtaaagaagaggcaaccacgttctccaatgcaatgctgtttgccctgaacatcatgaattcccaagaaggaggtaagtaggg

SEQ ID NO: 13913 - DNA, 1790 bp, Homo sapiens
aaaccaaagtcagcttcttgtcgctgtgcaggacgtcatgaagcctagggcaaaagaagggctcagccaggcaggtccgcctgacagacgtccagtgtcagcccccgcctcccccaagcggccacaccggcaaggagcacccgcctcccgcacacctgacgatgttcttgtgcttcagctccttgagtaggcagatctcccggagggcggaactcggcacaccctgcatatgtgagggggccggtgggcagcagtcagatcccacccagcccaggccctcaaacccctccccaggccgtatcccactccccagtcctacctcatcatcgtcatccagcctcacccgtttcagagccacgatctcatgagtctcccggtttttggccttgaacacagttccgtaggtgcctaggggaaggaggtcaggggtcagggtgaggatgcggcactcttccctaagccaggaaatgcctcctgagagaggtgaaggcagcgtctcagtatgcaagggaagggattcagggtgaaggtaggttggtgagctttgtgagtgaggatgtggcaggtggggagggaggagaaggtgcccaccgaggctccaggggctcggcaggaggggcgagtgcggttgccagggcaaggatgtctaaaatgaaggcggtgctccggaagggtctggaaatagtgaggaggggtctgggagaggactgaggggctgcagaaatattgaggttggaggtctgcagcaagaaacgaggctgggggtcggggtgaggttgtccaagtgctgctgaggctggggtgagaaatttcaggaagtgtcgcggttgggaggtcgggtctactgggaacgctaaggttggagtgagagccctgcgggaaatgctaacacggggaagactggtgtctgcacggagtgctgagctagggggccagggctgcagccgctgctgagatcggagcctgtaggcattgctgacggtaagggagccagggcttcaaggaatgccgaaggatctgcagaggagctcttgcaggaacatctcgagattccattaccttccccaatcttttccagtttctcgtatttctgcatcgcggcggccgcggggacccctgcgggccctcggttttaagactctggccccggcgttgcagaggaggcggcacctgagcctccagccccgccccgtctgcccgcgcagggccttctggggcttgtagtcctaaaacgactaggtctccccgcaatgcccgagaccgaggacaagaagactacaacccccagccgtctgcgctcacgctctctgcagcactcgactccagggctccgtttctaccgcggaggcaaaccttggacttcaagtcccaggaagcaacgcgtgtccgttttccgggcgccccgccgcggcgccgtggttcccagtgtgccccgctgttgttattccttttatgtgctcccagccctcttgaaaagggccgctccgggactacgcgttccagaatgcagcggaaatgggggcggagcgctctcggttaggggtttggggtttggcggcctagatcccgggcactggcggcccagcgctgacctggttggtggcattgtgttcccaacggcctcttgacgacctcagcacgggtttccacctctccccaagccacctagtgaccccagaattgactggggaatgcctgtgagcgatgatgacctcacagggaacagctgaccgcagggctgggagaacagctgtgccccttcgaggctggattttagtggagggacacac

SEQ ID NO: 13914 - DNA, 1788 bp, Homo sapiens
ccaacgccccttcttatagacttctcccagccataggctttttgcagaccataatgaaagggagaaaggatatccaatcgggatggtgatggcaggcatggcgaagtggacagggacaaagaagaggaaagcaagggacaccctttgttctttggtattcaacacatgaacaaaacttgttaacgaatcgtagactgggtaacaacagggctggtgagggaggacgatgtgggtggctgtggggaaactcttcccaagcatcccaggggtgggccaggaaggggagcagatggacatctacagggcacagagcagggagtggctattctctcctggaggggttgtgggtccagcaggctttcggatgaggccttggaaaggcaaggacagcttgccaactggagggcaggcaaaacggctgagccaggccagacacggcagctcactggccaggggcatggcctaggggctctggtgccaaggctgaaggggaacaacttggccagccgctctgtggccggcatcgtcacgcggcctccaagagctccggctgccctgcactggttcccagagactccctccttcccaggtccaaatggctgcaggagcgaagtgggcggaaaaaaagcgaaccagcttgagaaagggcttgacgtgcctgcgtagggagggcgcatgtccccgtgctccgtgtacgtggcggccgcaggggctagaggggggtcccccccgcaggtactccactctcagtctgcaaaagtgtacgcccgcagagccgccccaggtgcctgggtgttgtgtgattgacgcggggaaggaggggtcagccgatccctccccaaccctccatcccatccctgaggattgggctggtacccgcgtctctcggacaggtcagagcgggtcgccgggtggggtcgctgcaaaaaccctgccccggccgcagccggagaggcggagcctcgcggggagggggcgggaccgccgagacaggcctggaaactgctggaaatgccgcagtgccgccgccgcgccttccgccgcatgtcggcaaagagtccccgccagccccggccggcgccctccccctacgctgagctgcccctcagcgcgaaccctccgcccttcctctactcctgcgagagtcgggatctggggctacccaaggttgggtcccgaatgccagtccctctgtcgggacgcgagatgtgtagggcagatgctaggaagaagattgggtctgggagcggtggtccgcgtggttagctgcctccgctctttttcggtgtcccccccagtcccgcccttgggtgtggggacgcctgccccacaagtgtttagggaggtcagtgggttcctcgcccgtagagacaccgtttatgccaaatgagcactcctcatccccgctcttgatggagtcatgtcctagacgtgaaactatggggctgtgatcacaagcaaatgtgtgggcggatccgttgcttgggttcttccccgccccctctttttttcggaccatgacgtcaaggtgggctggtggcggcaggtgcggggttgacaatcatactcctttaaggcggagggatctacaggagggcggctgtactgtgcttcgccttatatagggcgacttggggcacgcagtagctctctcgagtcactccggcgcagtgttgggactgtctgggtatcggaaagcaagcctacgttgctcactattacgtataatccttttcttttcaaggtaaggctgagatctccgctaggcttctttccctttagtgctgt

SEQ ID NO: 13915 - DNA, 1786 bp, Homo sapiens
tgaagaggctcaacctaaagtggctggaactttgcttataaaataatatattacatttggttactaaaacactaggtttcctttaattgaagaatcccagtttgagtgtttctcaagtacagtgagtttcaaaggatagtggtagctagtagtattagtgaaaatagtcataactagcatttattgaatattatttgccaaaacgtgcctaacaattttacatgtattatctcatttaaccagcacaagcaaccctatgagaggtgaattattgttatccaaatttaaagatgaggaaaatgaagctcagaaatgtgaaatgacctttttagtattacacggaagatctgggactcaaaattaacaggctattatcaagaacatttatgaagggaccacattatatatgacagcgttggatgtccagtgaattttgcatgatacggagttgaattagtccctggcttcaaggactttcctttctcttttatcccttctattctgttcacacttttcttctagatactggaactataagcccaaaactacttaacatgaaagactttaggtacacgattccccactggcagctgctttaatggtgaaggatttcttgagtactagcagaaaacataatatataaagagagttgtgtgctagacaaatggactaagaaaccatgatttcttggggttttgttcttgctattttcaagctaaaatgcacccctgggattgcagatggtcataagaaaaattatcaagtgaaaagttaaccactgccaaactcatatgattgaaaattggccattgttatgtttagaatattttttgtgcatttgcaattaagaataaaaagtcagaatttaaaaatgaaaaaaagaaaagaaaaagccacttcaccaaacatttcctaaaattcacagattcccaggggtttgaagacagtattcccaatttggaatgtagtcctgactatcccaaggatcttggaatctcagggttagaagggatcttaaaaatcacccattttaacctcccctcaatgcaggaattctctctaaagcctcctcaacaggcggccaacccccatatccgcctgaatgcttccagagaaggcgagtcgaatcctttgttggacagccctgattgtttttcctgatgttggtgatgggccttgagaaaaagaaaaaaagaaaaaaaaaatctcagaacaattggcccatttagcaaacctcttgcctgtgaaacatggggctatttccatggtgcagctttaaagtactcaggaatgtatagggttaaaaaaaaatcaccatcagctgacgggtattcctgcacgctcccttccaaatactgatacccactctcacactagcctgccaagattccacttagcagctggtccccagttacatctcttcagttgacttcccaagcaagcctcccagaggcatatgtgaatgatgatgcacacacacaaatatttgttaatgaccatgggtttgggaaggtgttagtcatggctagcatcataccctttacagaagaatagagaggctgttgcagccccgtgctttctcctgctgctggccgattgcttgctctgaactaaccctctaacccttgggagtctgtgtgcagcagtgatgtgagctgcatccgggctgaaatgggagctcccgctatggcactggctcaaggagctaatctaaagagaaagtattttggggaagacatcttggttgcacccctcattgcatcttgactaattgcttccaactccg

SEQ ID NO: 13916 - DNA, 1717 bp, Homo sapiens
aattccttggggtgatgttttctcagattacattaaagtcatcctggactacaacaccgcccacaacaaagtggctctgtcagagtgctatacagtagcttctgtggctgagatgcctcagaactaccggccgcatccccagaggttcacatactgctctcaggtgctgggcctgcactgctacaagaaggggatccactactgggaggtggagctgcagaagaacaacttctgtggggtaggcatctgctacggaagcatgaaccggcagggcccagaaagcaggctcggccgcaacagcgcctcctggtgcgtggagtggttcaacaccaagatctctgcctggcacaataacgtggagaaaaccctgccctccaccaaggccacgcgggtgggcgtgcttctcaactgtgaccacggctttgtcatcttcttcgctgttgccgacaaggtccacctgatgtataagttcagggtggactttactgaggctttgtacccggctttctgggtattttctgctggtgccacactctccatctgctcccccaagtaggcaggctgtaggcacttgggctgactgcctgcagaagtcccaagaccctagtgaaaatacagcaggcagaactctccttggataattccccaagaggtcccaaggattgggagcatgggaggggagctggcgggagggtgggaggtgggatttagccaggaaaggggtgagagtgattgtgttgtgggcgaggaggcgtttccaccccctggtgcctatcagggcagggtgacctactccccattgttctggaaatctccaggctgctgggcagctgggcagagctctgggaagtgaagtcatgagtgcccgattcctcttagagaaaatccatagctactgtaggttctgtcttgggccacttggatctgaaggctgcccctttgctctctggggtagccttcagatcttggtgttttgaattcttactatagatgtttttaaagttccaaagtcattgagtttcaatgttacataaactccattacccgcatgttggggcttgatctcctggttattatctgtgcttgaggaaacacccacagcagtctctacccagaacagtttcctaaagaggcataccctcttcctccactggaaaatagtgcgttcccttcctaccctgcacacccatcgcccccacattgatggttttcaaacagcaaacttttcagctaaagcttcaaaccatgattggaatcagcctgtgttggatttgtgattcagggtcatggtgaccctgatccagtttgggtggaaatccttcctaagtatcataagaagcatcttggcagagatgctttggtggcagccatgagctttgctggaggccttgcttcccatagccttggctgtggggcaaggaactctgccaggcgagggggatgctgccctggatcaacagaagcctggtgggtttgctcgtgttagagtgtcctgccttcttactgacaactcttctcggtgatagcctctcttccctggattgtgacatatggaatgacagtgcaggtaccaccgaggctagcacagtcaagcctccagctaagctggatccctgaagcctgctatcatgcagacaggctatgcggctgcctcggaccatgctaggccacttgctggggtgtcaacctaccaccaaaggggtcttttagcaaacct

SEQ ID NO: 13917 - DNA, 1643 bp, Homo sapiens
ctgatggctacttccaacttgcttgagggccacaacggcgttgtccccatttgagatgtgtggatgggtggtgtctgtggatacctagcgatcaactttctgataggaggtttagagacagagctcttgtggcatcaggtcagtaccaccctctcccagaggggagaagttaggaagaacgggcagccaaccaggcattgggctctgtcctggtcttccagtgagtgtgcttttactcttcttaggcaagggcttagcctggcctctgtctccccctggcggtagacacagaacttgctcagcattcccggactgctctcagccctggccctaagagaaggatgggaggggaggaacccccactcctctctctgccattgatctcctttctagcccttcctccctgatccggagaagtaagcttggttcttaagacagagcaggtttgaatgtcaggaggccgacataggtgtgaatctttcacttgaccgtgtgacctcctggggcaagtcacggtaaaatgacaggaagcgtcccgtcctgcctcatccgtgaaactgacagaaaaaaaaccatcttgaaggattggtgtgcagtataaataacctaatactgtatggaacgtgctttgtaaagggtctagtatgcagtacttcttcaataaatagtatttgttatgttgttattatcctattaatagcttgtcctgctgtggtcagggaaggtctgcattgtgggaaagacctgggttctgagagagaaaggagggtgggagtagcaaccgctctcccagatctagaggtggtcttcacggggaacagcgcatcaggagcccaggaatctaccccggctcctgattccggggtggtcggctgcagcctgcgtcattaatcccgcaaccccacccggtaccagcttgcccgctctcgctccagcagccccatccagaggtggtgtcacacctggcgcctcatacccagcggctcccaagcgcctgttttgctctgaggtcattagctccatggctctctgggctggctggccacaccgaaccgagagcgaggagaccgcacccccttgtccctcagcccccgtcacaatggagacattctagctgtgtctaatctagcgcacggctgaaataaggtttccttctctccgcccccttcccacagcaacagaacctacccctaagaaacggaggcggggccaagccggaatggggcggggcagaggccggggacccgtgggccggttcctggggtggcccagagcaagggcaagtttcgcccgggacccgcccagctggccgggagccagtagcagggaagggccggctggcgcgagcaccgcccacgcggagccatgggggcggggcctgggcgggggcggggccgcggccgagggcggggcagggaggcagcatgctaaaccgggtgcgctcggccgtggcgcacctggtgagctccgggggcgctccgcctccgcgccccaaatccccggacctgcccaacgccgcctcggcgccgcccgccgccgctccagaagcgcccaggagccctcccgcgaaggctgggagcgggagcgcgacgcccgcgaaggctgttgaggctcgagcgagcttctccagaccgacctttctg

SEQ ID NO: 13918 - DNA, 1585 bp, Homo sapiens
atgaggctgacctaccaattcaatgtttccaagagcaaatagcagtaaaattacaaaacgttatttgttatgttgatgtgtgcaaacaaaaatgttctattttatagtacatttcaagttcaatctgaccctcatatctaaactatgtcatataaataatgtcatataaacagtgtcgaacagatcaggaacaaagctcttttcaaaaacaaaagtaggctccatgcagtggcagttaaagaaggggaagttctggtgtctccagagttagccgatgggcacaacggcagttgaaagagaccatgttacacaagtcattcaggttctggccaacatctgctttgaacaggtcgcattcccaggagctccaggctcccttaccccagggaaatgctggggtggtggcttgtcttacagaagtggtagccaaggggaccagaaggcacacccggtgctaaaacatgcctaaaacttcctctaatgtttacagctcttccaatgacatttggggaactaaagtatggatagcctcttcattgctagaaccgctataatatgataagttaagaatttgatttaatatttataaagaacttagaaagagcccagcgcatagtaagggctatgtaagtgtttggtaaataaaaaaaggcacctcccagattggctgggtgaagtctcaatctggtgagaagggagagaatcaaaatacacaacagtctatttttcactttgacaaaagatttagaaattacagtgctctgtatttattttgcacccaagtgcacactaagtagtctctggtgcaggactgaaattctactcatggttcagaagtcactgtgcacaactcaatgaaagcgttttaagtttcaagagatgattcctttctcttttctctttccaagtaacgatgactaaaaatgacagaatctaaaaatctcaaagcacttcttgtgggtacattccaaagctaaaactgtgagaattaatagggccagattcacttgaagagacgtaagggttcaaattacagagaacttaaaagacgcaacgtattaaggtcttttactacagatccgctgacaacaggttaaacgattccatccaccccactctggcggctgccccctccccgaccctcgcaggtgacctgcacccactttcgacctcagatagggtctccctgctcggcgttcccagttcctccaggctcggcggctgcgtgggggttaacaaggtccagccaccgacgccccttgggcgtttaggaatctcgaggcaggatctgaattcacctcgtggaaacaaagaccacaaactctccgggagccgggggctgggcggaggtacggctttttccgaggacaggcagcggccgaggcccgggcagccctcgccccgccccgtctcctcccgccccgggccgccgtcggagtcccgggcgcgcggaccctcccgccggccccgcacctacctggccccgcggtgctgctcccggcgcggcgggcgcggagccgaacgcactgcgcttcctccttcccggcagggccgccgggcgccggcgtttcctccttgacgcgtc

SEQ ID NO: 13919 - DNA, 1487 bp, Homo sapiens
cctctggaaaattccattgtgagtttaaaaggcaaatgacgtctataattctaaaactagttctcccaccgaaactctagaaaggatcttgggatctgcagggtctcccggatcacactttgagaactgctgctttagtcttcctcccatctcctaaggccagagctcctgagtttgcttcccactggccaaggagaaaagagcaaggtcacttgtcggggggctgcagagggaattaccttctttcatttgcaaatgttactgggggacacaccggctcccagtagggtttccgccaaggctccgcgaaacgccactagagggcgccgctagcgaatcccacagcgcgccccgctgcccccacttttgtcctccgggttcacacgggcgcccggaagagagggtggtgcctgggagaggaaacgatgcgccccggggccgcggcctcattggatgagaggtcccacctcacggcccgaggcggggcttctttgcgcttaaaagccgagccgggccaatgttcaaatgcgcagctcttagtcgcgggccgactggtgtttatccgtcactcgccgaggttccttgggtcatggtgccagcctgactgagaagaggacgctcccgggagacgaatgaggaaccacctcctcctactgttcaagtacaggggcctggtccgcaaagggaagaaaagcaaaagacgaaaatggctaaattcgtgatccgcccagccactgccgccgactgcagtgacatactgcggctgatcaaggtagcggagagccagagctcctcccggggcgtggggtggaggtggctccgtttcccagagtggggtgattcacgtcttgaggtctcggccggtgtgagagcccagcctgttcccctttctgcgcccatccccggctcggccgccaccccgcccgcccgccccattccgttcccctgagctggccgggccggagcctcattttgttttctacttttttctctcctatgtgcatccccccaggagctggctaaatatgaatacatggaagaacaagtaatcttaactgaaaaaggtaattcaacagtggcgggacgggggacaagcgttcggtgcctgtcaccttcgccaaggccattaccgcccctgctcccccttcttgcagatctgctagaagatggttttggagagcaccccttttaccactgcctggttgcagaagtgccgaaagagcactggactccggaaggtaacccctcgccctttccagaagccagagagaccaagtgttatgtaagaagtagtgtcggctgtgtagaaccactgactacacaggccgaagttactgagaacttggacagaaaaaatagccagcaagtgttcaaactactgaggaaaaaaaaaaattagatatgctgcacttaagaatactagggcaggttaaaagagctgtttaagtaagtatcagagtgctgtggagactcggaagtgtttaagc

SEQ ID NO: 13920 - DNA, 1473 bp, Homo sapiens
ggggagaacttcgtagcagtcatcctttttaggaaaagagggaaaaaataaaaccctcccccaccacctccttctccccacccctcgccgcaccacacacagcgcgggcttctagcgctcggcaccggcgggccaggcgcgtcctgccttcatttatccagcagcttttcggaaaatgcatttgctgttcggagtttaatcagaagaggattcctgcctccgtccccggctccttcatcgtcccctctcccctgtctctctcctggggaggcgtgaagcggtcccgtggatagagattcatgcctgtgcccgcgcgtgtgtgcgcgcgtgtaaattgccgagaaggggaaaacatcacaggacttctgcgaataccggactgaaaattgtaattcatctgccgccgccgctgccttttttttttctcgagctcttgagatctccggttgggattcctgcggattgacatttctgtgaagcagaagtctgggaatcgatctggaaatcctcctaatttttactccctctccccgcgactcctgattcattgggaagtttcaaatcagctataactggagagtgctgaagattgatgggatcgttgccttatgcatttgttttggttttacaaaaaggaaacttgacagaggatcatgctgtacttaaaaaatacaagtaagttctctgcacaggaaattggtttaatgtaactttcaatggaaacctttgagattttttacttaaagtgcattcgagtaaatttaatttccaggcagcttaatacattctttttagccgtgttacttgtagtgtgtatgccctgctttcactcagtgtgtacagggaaacgcacctgattttttacttattagtttgttttttctttaacctttcagcatcacagaggaagtagactgatattaacaatacttactaataataacgtgcctcatgaaataaagatccgaaaggaattggaataaaaatttcctgcatctcatgccaagggggaaacaccagaatcaagtgttccgcgtgattgaagacaccccctcgtccaagaatgcaaagcacatccaataaaatagctggattataactcctcttctttctctgggggccgtggggtgggagctggggcgagaggtgccgttggcccccgttgcttttcctctgggaaggatggcgcacgctgggagaacagggtacgataaccgggagatagtgatgaagtacatccattataagctgtcgcagaggggctacgagtgggatgcgggagatgtgggcgccgcgcccccgggggccgcccccgcaccgggcatcttctcctcccagcccgggcacacgccccatccagccgcatcccgggacccggtcgccaggacctcgccgctgcagaccccggctgcccccggcgccgccgcggggcctgcgctcagcccggtgccacctgtggtccacctgaccctc

SEQ ID NO: 13921 - DNA, 1422 bp, Homo sapiens
agagcaccttttgttgctaaacgctttctttagcctcgagggagagagtcatgtggagctggaagagctcattttgaagagaggggtcccggggagctccctccaagatctagaggctccgcggccacccctgccgggtcctgccaagacttgctagaaggaacgagtcgcgtgccttagttagttggttcccgtcacaggaagaaacgcctttgcagtgggtttaattgcttctgggccgagcgaattccccgccgtacaactcagtggtgcggactttgcctcctgctaccctgttgctgcgccgagcggggtgggaaagtttctggagttgtcagtcgcgcagcccgtggccacctagacccgaggtgcgggcgcctgcgaagggcccccgcggggtggccggggccgccggggcatgcagcgcgggggcgcggctcggtgacgccgcgggcggggacccggcatccgggcaggctgcgcgcgggtgcggggcgagggcgccgcggggactgggacgcacggcccgcgcgcgggacacggccatggaggacgcgggagcagctggcccggggccggagcctgagcccgagcccgagccggagcccgagcccgcgccggagccggaaccggagcccaagccgggtgctggcacatccgaggcgttctcccgactctggaccgacgtgatgggtatcctggtaagttacctggggagggggcggcgcaggaagtacagttcgcagcagcccctctgaaaccgggggctcccttctcgcccacccactgggcaacccactccgcagaggcgtccttctctggctctagttcttagggggctaaatacacacagtataggatttcaaaccctaattaaaaaataaccagccacaggtcccgtcaaaaggtgttttttaaacaatcgggtatgatattcaacagtttaatctgggacacctgctgacatgttggtgtggaaaaggcgagaaagaggccttcaaaaagtagatgtaaataaatatttggttggtgctggattagggaaaaggctgatgttactgatgtttatctcttcaccatttgttgtgtgaccacaagagggaaaacaaacatttccttactcagaactgccaaaatgtttgcctacttttttttgcagtttttcaatttgtggagttacaggatatttgttttatatgtttggggctaaaacaataggacttattttgctaaatctgtgctgtcatgtattttgaaatgtccagtgactaaaagcgcccctggatttggcatagtctctgggaagcagttcttctgtatggagggtgaagttttaacctgctcagggttgaataccttggggaagtaatagatttgctttggtggagctgtagttaggcaggtagactggaatcagatggg

SEQ ID NO: 13922 - DNA, 1310 bp, Homo sapiens
gaagatctgtgacttcgacctgggcagcggcatcaaactcaacggggactgctcccctatctccaccccggagctgctcactccggtgagggcccgcggggagggctgggggctcggccgcctgctctgcggttgcataacctcgcggagcctgggccatccagcagctccaggccgcggagctcgggcttccgcctagcaacagccgctgattggttgggcggggtgtcgcggcggggcctcgagcaggcgccccaacgcgtcggtgtttggccgggtggggcggggccgcggcgggggaggggcgagctctgcacctgctgattgggcgggggcgcgttcccggcagccgctgattggtcgggcccggcggggcggggtccgagccggctggcgcaggtgacccgcagttacccgggctcggttcccacgtaatgctgggaaaccccggctgacgcgcccctcccccgcccgcagtgcggctcggcggagtacatggccccggaggtagtggaggccttcagcgaggaggctagcatctacgacaagcgctgcgacctgtggagcctgggcgtcatcttgtatatcctactcagcggctacccgcccttcgtgggccgctgtggcagcgactgcggctgggaccgcggcgaggcctgccctgcctgccaggtgcggcggcccgcgcaccctcctctcctgggcaccctcctcccccgggcctgccctgaacaccccctaaccccaggggacctgccctgcgcaccctctaagtccaggggacctgccccctgaccaccccctaaccctcggggacctgccctgtgtgctccccagacccccggggacctactctgtactccccctaacccctggggacctgcccggtgtgccctactccctgatgccatccacagggcagtgccgccctgtctgccagtttcccgaaggcttttcaggtttgcctgcccaagggaaaccccagacagggttcagagagctgagaggtggagtgaggcccctggtttggggggatcaggctcaggctccctgcccgcggcttaaggctcagcatctgtggcctgtggtccctggaaccaggtccctcagagctgcttttttgtaaatccagctccacttgggtggagctgactctcctggtccggctcccagccccctctgccccaggcgtgcgtggtctagggcctggtctagggcctggttggggtccggttggagccacgtgtcagtgcacagtatccaggcccttgggcaggtctaagctcccctgtgttctatgtccccagaac

SEQ ID NO: 13923 - DNA, 1200 bp, Homo sapiens
gtccatctgcaggaaaaagacaccacttttgcaattttaaggaaaaggattaaaacagggattggccgggtgcggcgatgcgcgcctgtagtcccacttttccggaggctgaggcgggaggatcgcttgagcccggggactcgagaccagcctggccaacatagctagaccccgtctctaaagaaaaaaaaaagacaaaagaagagaacaacaacaaaaaaaccaaaataaaaataaaaataaaaacggacgggcgaacgcgtcgggtgggcgtagggttccgcgaagcctccctgtccctcttgtctcgtcctagtcggtctagctgggccccatcccctttcccactcggagcgtgagcgcctggagacacgtacagccaaccagtgagaaggagtggccgcgagtggcatgcacttggtccaattacctgcggccctgccggtcggcccgcgctggggccaatggaggtgcgaggcggggctcgggcgggggcaacggtcacctgatctgcggctgtcgaggccgctgaggcagtggaggctgaggctatgatggcggccatggcgacggctcgagtgcggatggggccgcgatgcgcccaggcgctctggcgcatgccgtggctgccggtgtttttgtcgttggcggcggcggcggcggcggcagcggcggagcagcaggtcccgctggtgctgtggtcgagtgaccggtgagcgggccggggtgggatgcgctgtggcggctgaggcgccctcgcccgactccggcgctgtcctaggcgaggggtggtgaggcccggaggtggactgttccttgctcgggggctcgcagcgaatctgccggcgacagagctccagtccacatgcgcccccgtctgacagcacctcttctgtgccctgccagggacttgtgggctcctgcggccgacactcatgaaggccacatcaccagcgacttgcagctctctacctacttagatcccgccctggagctgggtcccaggaatgtgctgctgttcctgcaggacaaggtgcgcccgccccagcccactctcccccggtcatcgggaggcagccaggccccctccccccatgacactgacgcccattccccaagggaagcttcagtgaccttgtcccaactgtagggaggtgtgggtcgtctcatgggaaggcctgtagtaaacgcttcagtggg

SEQ ID NO: 13924 - DNA, 1198 bp, Homo sapiens
tgaaccactgcttctcttttgaaagtagagctagctgccactttcacgtggcctccgcagtgtctccacctacacccctgtgctcccctgccacactgatggctcaagacaaggctggcaaaccctcccagaaacatctctggcccagaaagcctctctctccctccctctctcatgaggcacagccaagccaagcgctcatgttgagccagtgggccagccacagagcaaaagagggtttattttcagtcccctctctctgggtcagaaccagagggcatgctgaatgccccctgcttacttggtgagggtgccccgcctgagtcagtgctctcagctggcagtgcaatgcttgtagaagtaggaggaaacagttctcactgggaagaagcaagggcaagaacccaagtgcctcacctcgaaaggaggccctgttccctggagtcagggtgaactgcaaagctttggctgagacctgggatttgagataccacaaaccctgctgaacacagtgtctgttcagcaaactaaccagcattccctacagcctagggcagacaatagtatagaagtctggaaaaaaacaaaaacagaatttgagaaccttggaccactcctgtccctgtagctcagtcatcaaagcagaagtctggctttgctctattaagattggaaatgtacactaccaaacactcagtccactgttgagccccagtgctggaagggaggaaggcctttcttctgtgttaattgcgtagaggctacaggggttagcctggactaaaggcatccttgtcttttgagctattcacctcagtagaaaaggatctaagggaagatcactgtagtttagttctgttgacctgtgcacctaccccttggaaatgtctgctggtatttctaattccacaggtcatcagatgcctgcttgataatatataaacaataaaaacaactttcacttcttcctattgtaatcgtgtgccatggatctgatctgtaccatgaccctacataaggctggatggcacctcaggctgagggccccaatgtatgtgtggctgtgggtgtgggtgggagtgtgtctgctgagtaaggaacacgattttcaagattctaaagctcaattcaagtgacacattaatgataaactcagatctgatcaagagtccggatttctaacagtccttgctttggg

SEQ ID NO: 13925 - DNA, 1191 bp, Homo sapiens
agggtgcatgtgaggaacaaatgcatggacacggtgaagtgccacttcttcatttctagttcaacacaattcaattaaaaattactgggaggaggctacgtcttgaattaaactcagcattccacatctttgaggtggcggaatgactgaggggagggggtctgtctagccacatccaaatcttcctgagacagagggagatccctcatttgttgcagtgtattttccttggtcgcatctgacacaggggttctgtgggttgaacagaaagggactttgctggaggggaggcactctgcatagaaggaaagtagggacatctggcagaagcaggcgctccgagaataaacagtcaaagcagctcgcaatagtcccaaaaagctacccctcaccgaacctggcgtgcctgtcgccgcttgccccgctcccagggctcattggctcccagtctcgacgtcagacccgtagcctctcacctattgggccagccaggacctgaggcggagtgcagaagcgagggcctggagacagccgagagccgccttcaaggagggctgggggcggggctagaggaggggctgggggcgggtttcccgatgaaggggcggccatggcagctgcgcagaggcaacgcaggctgctacggagcgcgcgcccggctttgaatgagcggggctgggagtgagcgggcggagcgcgagctcgaggaagagacaggcagcgcgcgtgagcgcgccttgtgtgcgcgcgcggcccgcggcagctcggagcctccgccgggcgggcggggagggggaggggcaggtgagtgtgtgcggttcgcgcgtgcctgggaggggctttcctctccctacccccatcccgaccccagccctagcctctggggcattgtctgcccttcgccgtcggccctccgcctagccgcgcacttcccgccctcccaccttcctttcgcccttccaccagacctccctcgacgcccgacagctgctctgggtactgtttccgggtcagggtgacctctggggtgaggaaactgcgactgggagcgggacccaggcgtgcagcattcgccatgctccgctcacgcgtgggagactgggctgtggggtaccggcccggaaagcacgcagcctccaaagccgccttcctcagggaaatttgcgtgaccttactgccctccgtctacag

SEQ ID NO: 13926 - DNA, 1183 bp, Homo sapiens
gctatgatctcacctccttcctggcttctgcatatgctgttccctctacctggaacactttctcctgccttacctaaacttcctatgcatcatttactcttcactcagttcagggatactcatgggtcacccaactcaccttctgtgggacctggaaccccccaaccggatccctacagcccgatatcctacaaacactgccaatgtgacgtatgtcttccctgccacattgggagccgggggcctgggtctgactatcctctagcctcacagttgtctgcgaatgaagcagcatgcctgcgtgcagcacgggaaactactgccttcaggcagccagttgagctctcgagaacgtccctcttcccgcccagtcccgcgagcccgggtggcacctgataggtgatcttgggtcccagcgtggggtggaactcgctgaagaatatgcattcgatgcggcagccgctgcccatggcaataaccgggcccaggcccgtagctcctcgttcctcgcgcagaggcgtccccacctcctgtgaacacttgtcagagacagcctcgaggcctgtgtcgctggggcacgcaagcttgccaatccctctgcccaatggcgcctgcgcagcgcgactcagaggcgtggctggggcgggggacggctcgtcccaggaagtcctgggtgggtagacgtcgcacccggaagtaaagcggctccgtgacggagcggcggtgcgcgcggcagggcccggagtatcccgctttctttggaggaaaccaccgcatcagatctgcgctgcggcagaggcaggcaagtccctagcgtggaggggcagcatgctggcagcacttggggaggcggtgcgctaagggattcacgctgtaactgggaccgcagcagggaactacaatttccatagtgctccgcgccctcccagctggctctactgccggcgacggcgtggtacacgctgggatttgtagtcttacatggctttgcgcctcctacctggaaggcgggccagcgattggtaccagttcagacatgggtacacgttgacaggccgccggccgtcgactggcatgttgtgaccattcctggtgctggtcttggtactgttctttcctaccataacttattggaagagggtggcattcctgccttgcagccttttctccagtgaggagtgaa

SEQ ID NO: 13927 - DNA, 1180 bp, Homo sapiens
gtagagttgggggttctcgctatgttgcctaggctggtcttgaacttctggtctcaagtgatctgcccacctcagactcccaaagtattgggattgcaggcgtgagccacagcgcccagccaaaacacattttgatggtgtcataaacgtgcttctttaaccattagatagcaagatctggtcgtggcccaataactgtgataattttgaagatataatgaatctaaacagtatatagaggcatttgtgacagctgtgataggaagttatcttctattttgatttgtgacaaagccacaggtattgctaattctgctgtggtttgttgcctaatttatagtgaaaggaaaggtggaatatcagttacagattagagacagatgtgatctcttcctatccaagtttcaggtgcagggaagtgggtgttgctgtgtggtgagggtgaagaggttttctggaaatttgggtttaggaagaggaaatgttcctaaaagaggggacaatgatccacatgcgtggtgggccaagagggtgggcggatcctgccagagcctcctcccacctggaggggtcccagcgtccaccttccctgccccagcccccctcctcgaggtactgggaggctggataaagtcttcggctgggccacaccccaccccaaattctccctgtcccaccctagtggcccaggccaccccggcctgctcccttccgcaaggcacctcaccttctgtgcccagaccattagccaacgcggtgaccttgaccccggcccaggccctgctaatgaagaggaaagcccgtacgcactcggcctgacccacggcgaccctctgtgaccaatcatactaccaacctcttaaacagagctccaccgacgcaatgcccaggcataaaaaggccaggccggagagaccgccaccagtcacggaccctggacccagcgcacccgcaccatggccggccccagcctcgcttgctgtctgctcggcctcctggcgctgacctccgcctgctacatccagaactgccccctgggaggcaagagggccgcgccggacctcgacgtgcgcaaggtgagtccccagccctggtcccgcggcgctccggggagggagggacccgcagccacaggggcgcgccccgctccggcctcgcctgagaactccaggagctgagc

SEQ ID NO: 13928 - DNA, 1158 bp, Homo sapiens
gggagagatctcagcgaccttatggtctctctaactccctcgagatactgccgagaaatccacgaccccaaaaggagaaaaaatggcacgaatcttagttccccattcctcctacccaccctagatgttctaacggttagcacccggcagaggaagagcagaagttcacaagaagggtctgaatagaaccgggcagggctactttgggcacactgcctatggggtggccctgctctgcaaggagcagtgaaaaaagagaaccgggcagggagagagagaaagagagaggaaagaagagaaagagaaagagaaggagaacgagagagagagagagagagaaagaaacaggggccgctggccggactcccatcccaggaaaggtcacacagagaaagtttagggctagtcctgattcgggacagtttgctggggataaaaaagcagcagcagagtcgggtgggggagctctccctcgggctcaactgttcccgttgagactctccagttccccaaacacacccaaacacatggaaaagcaaagggaagggagtacccaatatctgatacctgatgcaggaatctggctcttcctggcagtcaaggttgcacatgaagcgctcccagtgcagccagcccatggtaggcgtccttgccaatccattgtccagtgctctagccccagggatgtcccaggaaacgagggccaggaagcgaagcgcaagcgcgcagcccagatgtagttctgggttcctcagctgcattgtcacggtgaccggacagcataaatttccgcgggtaacctgggcttttaagattaacctcaggggcggaccaatcaccgatgacttattaaataatgacgttattgtttctctggcaactgggacggttatccccagaggtagaccaataatcagtcacgtaagacgttccgctaaccaatcaccctcttcctttcttgatattgacccgccctatttccataccagaaggaagtgcggcaccttagtgatcccgagtttaagccgagagttgctcacgtgaccgagatctcacatgacgtaggcgctcacgtgattactcgcttacgtgagcagaagtagttctggtcgtcgtctaccgtctcgctatagccgtttgagggaagaaggaggaaaa

SEQ ID NO: 13929 - DNA, 1141 bp, Homo sapiens
agggcgagaggggagtattctaagcaattctgcttccccctaagcccgccagtggactgctagcgatggggacaggatcctcccaaacagagctgcaggctgggaggggggtcatgactgtattggggactgggggtctctcagatggagggtgattcagatcctgtccagctggaacatgaaaaagagctttcctggcttctccagacttgttcgggagagagaagcttgagtgtgagtctttgagcacggaggggtgctcctgggcgcccctactggaagatccaaaagtcttgccctttgaggagaagagtactttaagggggctgggagggttgggttgagccagggttcctaggacccactggagctgcagaggtgtttggggaaagaagagatatacttgcgggagatctactcctggactctttttttttttttctttttcttgcagctgagataattaagatccagggaagggaagtgacttggtcaaggtcacacagctctcagttccagctggtccctagaagaggattataattataggattcaggggcttgacagctagggcaggagtcaccgcactcacttccatattacgccgccgcctcacttctcagatttaggtgtgggtgtgtgtgtggttggggggaaaggagtgtaggataccacacgctgcggtcttctccaccgagcgctattttcattctttccgcagaacctcaccccgttcttgctctgaatcttcggttctgggtctgagggagggattctcccggattcccacggtccagtcttcaactaggagtggctcctttaagactcgcccttcccgaggtctattaaggagaggcgggggcgggcgtgagcctgtagatccgcccctgactggtgattggtcggtgggcgggcaggggcgggcctgagggacagggcctccccctacctctgctccgtaccctccgccccttcagtctggggctccgggtaaagtttcagcctccgcacgtgactcgctatggccgctgccatcgccccgcgcccctgagccgcggccccctggacggctcctctcccgggaccccgcaccctgatgccgagcagcaccagggcgccgggttagggcagacgctgtgct

SEQ ID NO: 13930 - DNA, 1139 bp, Homo sapiens
tgacctaacttttgtcaccttggatatctattgaatgttaaacatctctaataaagatggccaccacttaatgtgtggaaagtgatggccttctcgtgggccacgcgtttgggtgtgagtatggccttgaccaagggtcttggtgctttattcacttttagagatagggtcagttgcccaggctcgagtgcagtggtgcagtcatagctcactgcagcctcgacatcctgggctcaagcagtcctccagcctcagcctcccaagtagctaggaccataggcacatgccaccaaacccagctatttttttaaaacaattttgtagagacaggatctcactgtgttgcccaagctggtcttgaactcctgggctcaagcaatcctcctgcctcagcctcccaaagtgctgggattacaggtgtgagccactgtgccaggcccttggttcttttaaaaaattaatcctgtcatgtaggatgtccttacagaatgaaaaacctagcaagcttattccccaacagaacctaataccttggttggattctattgctaattgaaatgagaattcggttctatggtcattggttcagggtgtatgtattgtgagctgctggagacagaacggtgaacaggcatgcctcccggagagccatatgcaaagcacggagagccacatgcaaagcacgtgttggcaacatagcacatgctgctgctcaccaggctcacctgggatgacggtgtggatctgagtcgctggccacgtggcgacgtctgccctgccctagtgtccaaggacggtgaagggtcgggtgtcaccaacacctgcagccttctcaccgggcgaggcttgggttgtgggaagtgggggacagctggccctggtccccagccctgatggacatccggcattttgctggtgcaggctgtcctgaagccagaccctcccgagactgctgtctgggaggagagcgagccagcggcccagatgccttggtcgtggggaggtgcctgtgtgtaccgtgagtttcccagcctccggcggcaagtgggaaagccggtacaggaagagtggtgcctgcaggtgctcccggtcaccaccaccccttccagacgccatccccagagctcacatctgtgctg

SEQ ID NO: 13931 - DNA, 1070 bp, Homo sapiens
gcatgctttcaaaaattgtccatcttcgttacagtaatattttccttaattattctctgaaaacagctcatccccaaaccgtcttggtttttacgttattacatctcagtggtgatggatgaggccctaaacgcggggaaaaccttttacaaaagttttgatggctggtcctcaagctttgagatttaccttccaagaattaagcagcactatcgaaacaatgctggcaacatttttatgaggttgcaaggaccacggttgctgcagctacaggatgagttataacgtcagaagcaacccaagcgttacttcaggcccatcttcaccggagaagcccgtatgaatcaggcaaaaacataaaaacaggttctgtgactttgccgtatctcatttagatcaagtagcacgcagaaggaagacaaggattttaaaatctggctccaacattctccacttggtcgcgttctcaaatctcagcccagggccgctgacgtaaagtcgcctctctcgtgggcaccacgggctcgagggtagccggcagctgaaacccgaggggcttcagaggcttggaggccaggagcaggcagagcgccgatgggataatgagattctccagcagatcggcgctcaccgacctactccatttcagtgggtagaggtaaaggctgaaaggcgaccctcgcaccgcccggcccacctaggcagtgccggcctagcgtctctaccccatagagcatgcgcgggaggtaacggcccgcccgccaccggccacacaggcctgtcgggaggcggggccacgcgtctgcgcacgcgcgcagggacacataggcggaagtggcctgcgggcgccggagttgagagtgctttccggggaggcgaccgccgcggtggaaagtgcaggagtgggcgaggaggaggaggaagaggaggtgatggcgacggaccaggggagggggagatgctccgtctagctcagacgccacgcaggctgccgtcacccttccgggtgacataccggccttggggtacgcgtgccttcggggcctttcctgtgtttgggacccagatct

SEQ ID NO: 13932 - DNA, 1047 bp, Homo sapiens
aggtctacaagaacctcatccccatcctggaagcccaccgtgactacaagaagctggccgcggtgcacggcaaactgcaggaggccttcaccaagatcatgcaccaggtgggcccaggaccccctccccagaccccaccctcagccccactcctcatccccactcctcatccccagggatctgctgaccttgacccttctcttccccacagagttccggctgggaggtgagtcagccttggtggacagccacctgcctctgggacccccgtgatgactggccagcagccatcagtgaacaccagggggcaccagaggagcatggccgctggcccttggggctggggctgtggccacaagggacccaccccattatttccctcccttccccaaaaatgcccccaccccccgccccagatctcgagggcagcttgtgactcacccagctgggagctctccagagacacccctccctctgccagggccagcttggtcactgcaggggggtggcggggtgactcttgactccctcatggtctcttggtctctttctcatctctccccagtctatcacgtggctctccctatcttggtatctcactgtctcttagtctctgtctctccctgcgtacccagcttccagcctcccccaggctctctgctcctcatttctggttaatgtgtcctcccgctccagcccccccgaatcccgcttcttccctgcttaggtctatttttaggcatctcctagtttggggagaatgttctggccaaagatggcagaaacccagagcccaggcaggcaggctgggtgggagctgggtggggagggcaggtcctcttcgcccccgcccccctcccgtctctgatctctccccccacggaatgattctcacggggcagtgttaaccaggaccctgggggttgagggaactctgacctctgacctctcccatgacattgtctctctgtcccccacacctctggccccaccatgtctgccccatcctccccggatcggccttggtaagtgaacatccagccattc

SEQ ID NO: 13933 - DNA, 1044 bp, Homo sapiens
ccctaccctaagtccttaaccgaacccggaagcgagaagatgacttttgtttgtttttagagatgggcgcctggctctgtcgccagcctggagtgtgggggcgcgatctcgactcacagcagcctccacctcccgagttcaggcgatcttcctgcctcagcccctcgaggagctgggaccaccggcgcgctccatcgcgcccggctaggagctgactttgaatccgggctctgcgcctggccttctgcatctctataagggaagacatctgtgacctcggggcaaaggtcaaattagatcctgggtaggatcctgttcccgctgcccctcgggctggcactgccaggagtactcagagctcaaagctgggatctgcagtcccttacccactcagtgcacgccgcctaaggctttgcgcttcacctttactcacctcgaagccctggacatccgcatctgccctaagacttctcacctcagtagcagaaggaagtcgcgtcagctggccacagcctctctcctaggagaccgtccgggaaaagcgagtcagggtagaccctgaggcccctcagctccggctattttcagatctgtcgctccttcaccctcagcctttcaaacaggccactccaaaaaaaagcccaatcacagccttccttcttctcctggccttccggcactgtccaatcaacgtacgccatctatcggttagtggtgttgcggggccacccttcccgctggtttccctcgtggtgtgtaaaggcagagaggaaaggcgaggggtgttgacgccaggaaggttccatcttggttaagggcaggagtcccttacggacttgtctgaggaaagacaggaaagcgccagcatctccaccttccccggaagcctccctttgccaggcagaaagggtttcccatggggccgcccctggcgccgcgcccggcccacgtacccggggaggccgggccccggaggacgagggaaagcaggccgggcgccgtgagcttcgcggacgtggccgtgtacttctctcccgaggagtg

SEQ ID NO: 13934 - DNA, 1009 bp, Homo sapiens
gattctgttgttgcctccttgacttgaggccctgcagacatggagttcctcgaggtgctgaccgagggccttgagcgggtgctgttggtgcgcggtggtggccgtgaagtcatcaccatctactcctgagcccagtgtcatcttgtggcctggagtcgaggtcttggccaggacataacaagctgtggtctggggtaacagcctcttcccagcacccacctgccagccctgcttgcctggccctgtcctggacccagctttgctaggtctccttggaaaccaggcctgggcctcaaaatggagatggatcccaggtcttgtgggaccctgggatgtttggggactttactatctagcaccccagtaggcctgtcctggccagagaagactggtaggggccgagtggggtttgaaggcagccggcccggcccagcccaggagcgctatttattgcatatttattgtttggatgtcaccatcagagacgaagggaagggtagccagggagggagtccagcccagctgcctgcaggaagatctggctcagtctactatgggcagggccccccaccaagctgagccgaatggagacagctgagctgaggcctgactttttcaataaaacattgtgtagttctgggcctcctgctgccccggctctgtttcccctggcgccaagagaagaaggcggaactgaacccaggcccagagccggctccctgaggctgtgcccctttccggcaatctctggccacaacccccactggccaggccgtccctcccactggccctagggcccctcccactcccacaccagataaggacagcccagtgccgctttctctggcagtaggcaccagggctggaatggggccgcccggctccccatggcagtgggtgacgctgctgctggggctgctgctccctcctgccgcccccttctggctcctcaatgtgctcttccccccgcacaccacgcccaaggctgagctcagtaaccacacacggc

SEQ ID NO: 13935 - DNA, 984 bp, Homo sapiens
ctgtcttgcatacttgtggttgcctgaccctgttaatttatcagtatttatcttagaagaaagaaatctaggtcaaaaacgcgaacgtattagtaaagaagatacaatgggaaccaacctgatgctcttacagcgtcaatactgttagttgagatgtggaccatctatcagtttgtaattaagaaaaagtctggcacgtgactgaaactgaggaagaagtagaaaaggcaaaaggtcaaaggtctcatgggaaggaaggagggtagagacagtgagttttattggtccttttatggttcagacttccttcttcatcgactctccctaattctcttcactgttcatccccagcaacttttcttcccaagcatttcctgcgggcttttattaccccaggagtgccaatcaaggcgtggaacagataaagctgtgtagcaactaacgcgtgactcttgtgagtgtggagggcaaacgaagctccctgaaacctccgctctgctctcctgccttacgccgcgcggcccctgttctgaggtttaatacttgcttcacagataagcgctgcggccacgttccggtgcccaccttctccttggctagggcacgacgccagcccagggggcgcggccctgagctgctgcgagagacagctgaaagcgccggcccgacggccttggctccctcggtgcgctgggcgcagagcactcggaccctgggcgcccactgctcgagtacctgcgcggctcctagccaggcttagcccaggcgcgggctgagagtcagttcgccaggtgggcctggagccatgggctgggtgggcgggcggcgccgggattctgcgtcaccacctgggcggagccgttctgctgctgacgacatcaacccggcacctgccaacatggaaggtggcggcggcagcgtcgctgtagctggcctcggagctcgaggctctggagcggctgcagctacagtccgggaacttct

SEQ ID NO: 13936 - DNA, 967 bp, Homo sapiens
gggggacaagatgagatttaagtgatcagtaatattctagtacttctattgggtgctgaattcacaggaagttattgtaattaagatgggcagatcgatagataggcagtcctttaagaggccacggaaacaatgtgtcagaatgaaagcttctgttctattctctgtactaagtgctttaagaaagccaggggccgggcgtggtggctcacgcctgtaatcccagcactttgggaggccgagacaggtggatcatgaggtcaggaattcaagactagcctggctaacatagtgaaaccccatctctactaaaaatacaaaaattagctgggcatggtggcacatgcctgtaatcccagctactcgggacactgaggcaaaattgcttgaaccaggacccgggaggcagaggtagcagtgagtgagatcgcaccactgcactccagcctgggctacagggcgagactctccctcaaaaaaaaaaaaaaaaaaaaaaaaaaagaaagagaaaaaaaaagccaggtgaagatatatttcagagatattttggaggtgagatcaatagtttccagacattttttcctcttaaattggttttagattagatctccaaagaagcctcactgtgcgaggcccacgtgctttcacatcccgcgctttttgccctttgcccttggccgtcgttgcttcccctccaaagggaggtggggtgacgcaaggcagtgggggagggggaaacggccggcgggcttaaagctctccgattggtggactgaggagcgagaacgaggctcgagctgaagcgttaaaaagaggaacaaagggggtggggctaacggaaggcggggctaaaggagcttaacggaatcgagacgcaagtgcaattgtccgcgcgcctcgctgcgatggcggcggcgccgagcacagtcaccccgctggcggcggagtcttcccctcaggaagctac

SEQ ID NO: 13937 - DNA, 917 bp, Homo sapiens
ctacccccaaagagagacgctatagcccatgagtctcagggtttttttttaagggattgcatgggatccccgggtttcctaaaccccccacagagtcctgcccaggccaaagagcaaggaaaaggtcaaagggcagaaaaaatgctgagttaggaggagctatggaaggataaacctggccttaaagaggtcaaagtggtttatagggggcgctgagggcttcccacattctctggcctaaaccttgcaggcagatctgcccagtgggctctgggatagctgtgccttccctaagaaaaaaattgtgcagaaaaggatgaaactctattttccctctagcacataaccaagaatataaggctacagattgcctttcccagaggggaaaaccctgcagcaacctgctgcctggaaaagtgtaagagcagatcactggggaatcgtttgccccccgctgatggacagcttccccaagctggaagggcaggtgctcagcatgtaccgtactgggatggttgtcaatactcctggtcctgtaagagtccccaggacactggccatgccaatgccccctcagttcctggcatcctttttgggctgctcacagcccccagcctctatggtgaagacatacttgctagcagcgtcaccaacttgctgccaagagatcagtgctgcaaggcaaggttatttctaactgagcagagcctgccaggaagaaagcgtttgcaccccacaccactgtgcaggtgtgaccggtgagctcacagctgccccccaggcatgcccagcccacttaatcattcacagctcgacagctctctcgcccagcccagttctggaagggataaaaagggggcatcaccgttcctgggtaacagagccaccttctgcgtcctgctgagctctgttctctc

SEQ ID NO: 13938 - DNA, 913 bp, Homo sapiens
ctagaggcaatattggggtgttggtcttccccaaggggaagggtggtgaggctgagggagaagcagttatgttttcagctgggcaaacatggacggttgcccgtagaaactttgccactgtacttcagaacgttgccctagtcgttggaggagaacaatgtgttccctttctagccaccctggtccacggagggaggagggagagagagaatgtttcctcttcggctgttgtggcttgagagtttctcttctttcggaggttttgtggtagtggctggcagttattagtatgcctcatggcttttaaatttccagatctttttgatttagaagtggaaatttcctaattacttgacaagtcttgtagaattccataatgttgtgattcttgcccactatcttaagtgagactttgcatgagacctatggaaattatggcagcattccccttagaatctggcttgaatcagcttttgtgtaggaaactgctagccttctaaaaaaatatattgtaaccttgtttcatcctcaaatctaaatgtgtaatgagttttcttttggtggggaggggcggtgggtttgagttaagaccacagctaggatgaaagacaaagagaaaaacaaactgtggaagccaagcctgttctgtggctggattttacttatattggaagaagttctatgttttgtaaatttgtgtattggttttgatttgtttcctctgatagtttagtatttggatagtttagtgttaacctcagctacactgaaggaatagaccttagtcctcacaagtataagttctagcttggaagcctgggttctgcagtagctgtggaacttaagcctgtgagctcagggatgcagaggcattgagttactaccaagggcctgatcttttctttagcaggca

SEQ ID NO: 13939 - DNA, 912 bp, Homo sapiens
gcattccggatcctaaggttaaaagaaaaccccttgccctcgggccagggctcacctgtctcgggagtggggaagaagcgcgactcccggccgctttggagtaggcgtcccagcaaaactctcgcctcatcaccagacactaccccgggcagaaggttcctaggctaggtcctcggacccgagagggagcgacacgctcgcttggtctcttgggtctccaggacgccgccgccgccgccacagtttcctcaggtgctacaaagcagccagggtgtgcgtgcgctcccgcctcgtcgcttagcaacctgagaagctgtccggtcgtcccaacttatcaattcccccgcccctccagagtgtcaatcgttttttaaaagattttgtttccgggtcgatccagctttacgcagcggaaggtctctttacctcccacgtttaccctcatgggaggatgcagtctcagtcacgcgcgtgggggtgatgtcgctaaggggtgattctcccctccctagagttacacacgctatctctcccgccaattgccgggctccatcaggcaggtcctttcctcctgagcccaaaccatccgtttgttgtcgtcctccaatcacaggggctcatcctcagggactactttgcaatcggcgcagagcgcagtgagaagagcttgaaaaaaacctctggtatcgggaagtgtagttcaacacttgaaggaaatgctttggagattgcgccacaaccagggcagcgtaaactacagttcccagagagcgccgcgtcgggagcggagccttttctcgctaacaccgctcgccctctccgagtcagttccgcggtagaggtgacctgactctctgaggctcattttgcagttgttgaaattgtccccgcagttttcaatcatggtgagtg

SEQ ID NO: 13940 - DNA, 1067 bp, Homo sapiens
aaggccttacagtgagatgggatcccagtatttattgagtttcctcattcataaaatggggataataatagtaaatgagttgacacgcgctaggacagtggaatagtggctggcacagataagccctcggtaaatggtagccaataatgatagagtatgctgtaagatatctttctctccctctgcttctcaacaagtctctaatcaattattccactttataaacaaggaaatagaactcaaagacattaagcacttttcccaaaggtcgcttagcaagtaaatgggagagaccctatgaccaggatgaaagcaagaaattcccacaagaggactcattccaactcatatcttgtgaaaaggttcccaatgcccagctcagatcaactgcctcaatttacagtgtgagtgtgctcacctcctttggggactgtatatccagaggaccctcctcaataaaacactttataaataacatccttccatggatgagggaaaggaggtaagatctgtaatgaataagcaggaactttgaagactcagtgactcagtgagtaataaagactcagtgacttctgatcctgtcctaactgccactccttgttgtccccaagaaagcggcttcctgctctctgaggaggaccccttccctggaaggtaaaactaaggatgtcagcagagaaatttttccaccattggtgcttggtcaaagaggaaactgatgagctcactctagatgagagagcagtgagggagagacagagactcgaatttccggaggctatttcagttttcttttccgttttgtgcaatttcacttatgataccggccaatgcttggttgctattttggaaactccccttaggggatgcccctcaactggccctataaagggccagcctgagctgcagaggattcctgcagaggatcaagacagcacgtggacctcgcacagcctctcccacaggtaccatgaaggtctccgcggcagccctcgctgtcatcctcattgctactgccctctgcgctcctgcatctgcctccccatgtaagtcctggtcttgac

SEQ ID NO: 13941 - DNA, 987 bp, Homo sapiens
gttctgctttgcaacttctctcccagtgcgagagcgcggcggcggcagctgaagacccggccgcccagatgatgcggtggtgggggacctgccggcacgcgactccccccgggcccaaagtacgtatgcgccgacccccgctatcccgtcccttccctgaagcctccccagagggcgtgtcaggccgcccggccccgagcgcggccgagacgctgcggcaccgtttccgtgcaaccccgtagcccctttcgaagtgacacacttcacgcaactcggcccggcggcggcggcgcgggccactcacgcagctcagccgcgggaggcgccccggctcttgtggcccgcccgctgtcacccgcaggggcactggcggcgcttgccgccaaggggcagagcgagctcccgagtgggtctggagccgcggagctgggcgggggcgggaaggaggtagcgagaaaagaaactggagaaactcggtggccctcttaacgccgccccagagagaccaggtcggcccccgccgctgccgccgccaccctttttcctggggagttgggggcggggggcgaagcgcggcgcaccgggcggggcggccacgccaggggacgcgggcgtgcaggcgccgtcggggccggggtggcggggcccgcgcggagggcgtgggggcagggaccgcgggcgcccctgcagttgccaagcgtcaccaacaggttgcatcgttccccgcggccgccgcgcggcccctcgggcggggagcggccgggggtggagtgggagcgcgtgtgtgcgagtgtgtgcgcgccgtggcgccgcctccacccgctccccgctcggtcccgctcgctcgcccaggccgggctgccctttcgcgtgtccgcgctctcttccctccgccgccgcctcctccattttgcgagctcgtgtctgtgacgggagcccgagtcaccgcctgcccgtcggggacggattctgtgggtggaaggagac

SEQ ID NO: 13942 - DNA, 949 bp, Homo sapiens
aggtatggaatacaggggacgtttaagaagatatggccacacactggggccctgagaagtgagagcttcatgaaaaaaatcagggaccccagagttccttggaagccaagactgaaaccagcattatgagtctccgggtcagaatgaaagaagaaggcctgccccagtggggtctgtgaattcccgggggtgatttcactccccggggctgtcccaggcttgtccctgctacccccacccagcctttcctgaggcctcaagcctgccaccaagcccccagctccttctccccgcagggacccaaacacaggcctcaggactcaacacagcttttccctccaaccccgttttctctccctcaaggactcagctttctgaagcccctcccagttctagttctatctttttcctgcatcctgtctggaagttagaaggaaacagaccacagacctggtccccaaaagaaatggaggcaataggttttgaggggcatggggacggggttcagcctccagggtcctacacacaaatcagtcagtggcccagaagacccccctcggaatcggagcagggaggatggggagtgtgaggggtatccttgatgcttgtgtgtccccaactttccaaatccccgcccccgcgatggagaagaaaccgagacagaaggtgcagggcccactaccgcttcctccagatgagctcatgggtttctccaccaaggaagttttccgctggttgaatgattctttccccgccctcctctcgccccagggacatataaaggcagttgttggcacacccagccagcagacgctccctcagcaaggacagcagaggaccagctaagagggagagaagcaactacagaccccccctgaaaacaaccctcagacgccacatcccctgacaagctgccaggcaggttctcttcctctcacatactgaccca

SEQ ID NO: 13943 - DNA, 1086 bp, Homo sapiens
gtctctggtcactacctccctcatcagctttgcgcctccactgtcaccctcaggaatgttccacatactcagcgagtatgcttggggggcaaaagggtgaaagatacaaaagcttctgatatctatttaactgatttcacccaaatgctttgaacctgggaatgtacctctccccctcccccacccccaacaggagtgagacaagggccagggctattgcccctgctgactcaatattggctaatcactgcctagaactgataaggtgatcaaatgaccaggtgccttcaacctttaccctggtagaagcctcttattcacctcttttcctgccagagccctccattgggaggggacgggcggaagctgttttctgaatttgttttactgggggtagggtatgttcagtgatcagcatccaggtcattctgggctctcctgttttctccccgtctcattacacattaactcaaaaacggacaagatcatttacacttgccctcttacccgaccctcattcccctaacccccatagccctcaaccctgtccctgatttcaattcctttctcctttcttctgctccccaatatctctctgccaagttgcagtaaagtgggataaggttgagagatgagatctacccataatggaataaagacaccatgagctttccatggtatgatgggttgatggtattccatgggttgatatgtcagagctttccagagaaataacttggaatcctgcttcctgttgcactcaagtccaaggacctcagatctcaaaagaatgaacctcaaatatacctgaagtgtacccccttagcctccactaagagctgtaccccctgcctctcaccccatcaccatgagtcttccatgtgcttgtcctctcctcccccatttctccaacttgtttatcctcacataatccctgccccactgggcccatccatagtccctgtcacctgacagggggtgggtaaacagacaggtatatagccccttcctctccagccagggcaggcacagacaccaaggacagagacgctggctaggtaagataaggaggcaagatgtgtgagc

SEQ ID NO: 13944 - DNA, 1086 bp, Homo sapiens; identical to SEQ ID NO: 13943

SEQ ID NO: 13945 - DNA, 926 bp, Homo sapiens
ttcaaacccgaggtctatcatgtccttaatgtcctatcatgtcagtcagttagcctgcctttcatattttccacacttacaggtcaccatagactcacctgaactgtgagaagtagaggaaggcgtcccagaggaggtgattttaaagcccaggtttgagatgggtatgcatttccaggcaagagagcccggccggtgcaaaagcaaggcttggctcacaaacgggaatgtggggggtggagacagggaagggagaagtcaatccctgggcaagacctcctggagtctctctaacaaataaatactactttccatgcagtagacgctgttctaaacactttacaaatattaactcacttggtctttctacaaccctacgaggtggtactgttactatccctagtgcaccgaagtcacccagcggccgagtgagaactccagtccagctttccacccgctactccgcgcatcccagcttgccttacagccgggtaccggctccaccattttgctagagaaggccgcggaggctcagagaggtgcgcacacttgccctgagtcacacagcgaatgccctccgcggtcccaacgcagagagaacgagccgatcggcagcctgagcgaggcagtggttagggggggccccggccccggccactcccctcaccccctccccgcagagcgccgcccaggacaggctgggccccaggccccgccccgaggtcctgcccacacacccctgacacaccggcgtcgccagccaatggccggggtcctataaacgctacggtccgcgcgctctctggcaagaggcaagaggtagcaacagcgagcgtgccggtcgctagtcgcgggtccccgagtgagcacgccagggagcaggagaccaaacgacgggggtcggagtcagagtcgcagtgggagtc

SEQ ID NO: 13946 - DNA, 1083 bp, Homo sapiens
ctgagtattctggcccttaaccagttagaactccccagttatctgtcctgctgatggggttgaaatctacattcctgaccctggcccaccaaagcccctcccttagctcccatctccctcctctctccctgtcttctcctctgctccagacactctggcttcatttctgcgttttttgtaccccataagctccttcccaccccggggcctttgcctttgctgttccccctgcggggaatgccggatctctgctcagatatcctcttctcagatcagcaagctaaagcagccacctgtgtctgcctaacccaccaccgtagtttaactttctgcctagtctttatcactagctgatatttctcaggatcctttagttacttctttttcgtcttcccctcctagaatgtaaactcttcccctcctagaaggtaaacaaaagacctgttctgttttgttcttcggcccatcccaagcctagcgtagtgcctggtatgtggtggtgtccaaacccaagcgtggagtgaatgagggatgaatccatgagagagtgagcggctccagtgggtatgcgcgagtgtctcactcggtgtagatgtgtgtgttgtgtgtgttgtgtgtgtgcgcacgctggggaggccagacaagtgtggaccagtgattggggcacctcttccctgcaaagaggccaggggaagacagtgcgtgtggggtcttctaccagggaggatggcttgctggtgtgtcccccccaggggaggactaccaacgaaggggacccgggagatggcgggtgggggcccccgggaggacagtgggcgagggagggggtccttgccaggcctggggcggccgggggcggtcctgggctcccctccgtcccgcctccaggcctcggggcctggctggccgacgtggcgttggcggcgctgcgcgcgggagggcagggcaggagggacagaggcgggggcgggccggaaagtttgtccggcggcagcggcgttggggactccggcgggggatgcgcgcccggcccctcagcgcccccagcacgccgccgagtcccgctcgccatgggtaagtccc

SEQ ID NO: 13947 - DNA, 1028 bp, Homo sapiens
gctcaaagtagactgggatgtggccgtgcttggtaaactgtaaaatgattagcatacgtgaagcgttagtgtgctccctggcagtcagtcctcacgtttacgatggattaatgaaggcagccaggcacaatctcaggttatgaccttataaggcataataggattacaaggaggcaaaatgaaacagtatatttcctcctaattttggttattcctatgtttccaaatagaaatgaaaattctgaaatttcagataattcccccctccaaatcccaattctcaatttagcttttctgagccttgtccctaccgtgaaatcttactagctcaccccgaaacgccggggtcttggtcctctgggggactagtgagtcctgctcctctcggctttgctccgtccctgccccggcccctccgcgggagtctggggtcgcggcccggtcaggcgccaagccggcaggggggcgcggtccacttgaggccacagctccccaggtccagggctcgggccatccgcgctgtcccttccgcgggctcttgctgttcttcgccaggaggctttgcactccgggccgcatgggtcctggataaggacctcaagaggttgtagtggcgccccttcgctccggcgtactgtctgaaccctgtgcccaaagagggctgtggcagttcctgcaccaaccgcctggagcccatacctaagccctctgggcacgagggacctcctctcccccgctcccccctccccccatcccaactccagccccaaaggaagcaatgcgcgcgtccgagagcaggagcgcgcgtggctgaggaaagaaagggaaggcaaccgggcagcccaggccccgccccgccgctcccccacccgtgcgcttataaagcacaggaaccagagctggccactcagtggtttcttggtgacactggatagaacagctcaagccttgccacttcgggcttctcactgcagctgggcttggacttcggagttttgccattgccagtgggacgtctgagactttct

SEQ ID NO: 13948 - DNA, 908 bp, Homo sapiens
cttaagtgctaagagggcaccaacagcgttcctcctccccaaggagcataatgtgatggttcctgccggccctggctgactctcgccgtccttggagataattgggttcagtgccacctggaccagaactggggatgcggaagcaagaggcgagtctattgctctctctcggtcctgggccgccctgtgattgttgggcgtccggaaactgtctcccctatgggtttaaaaacaaaactgagcgcccatggggtgtgacagtcatctgcaggggcttgggtggcccatcaggcgaggctttctcggcacccgaggctccagcctgatctcggtcttatcctgcgaccgggctggttctggcgggtcgccagggtgggcggcggccccagccgggcgccccggcggcaagagcggcaggctgcgcccctggcccgcgcctagcctggggagagagctgggcgggcggcgggagctgctctcgcgggccgcggccctcgccctggctgcaacggtaggcgtttcccgggccggacgcgcgtggggggcgggggcgggggcgggggcgaggccgcggcgagcaaagtccaggcccctctgctgcagcgcccgcgcgtccagaggccctgccagacacgcgcgaggttcgaggtgagagaggtccgggcgcgtctggcctcgaagggagacccgggacgtggggcgcggggcgggagtggccggacctccacccagtgcccccgggccccgcgactcgtgcgccgggccgccggagagggtgtacttggttctgaggctgtggtttctcctcaggctgagatggatcttgaggcggcaaagaacggaacagcctggcgccccacgagcgcggagggcgactttgaactgggcatcagcaggtacatccccag

SEQ ID NO: 13949 - DNA, 1001 bp, Homo sapiens
cccacaatacatacacagattccaaaatgcattcttaactcttaaaagattttggttacttatcactattctgtctacttttctgtaattgagaaaagtatttgtcaactcattttttctctctgtgacagctcagtcatttacaaagttttattttatactttactccttccttcaatttgtgctaaaacattgtgaaaattaacatttctttggaacacaactttttcattataaattaaatactgatataattgcaaagtaaacaaatgaatttccataaagctaatttatctttatattttccatacttattacttcaaattcttgttacattttcaattttgtttgaaatatcatatggtattttaaattgaaatttactaattattttttagccagtggataaagagaaattaaaaatttgaacaaattaattcaatttttacttcacttctcatttgaaggtcttcccagtaacctaccaaaagaagtctctctcttttttttttttttttttagcttagattctaatcttcattctgcctattctggctaaacttctcaactctggctatttttcaattataccccaatccctaagccatgtaactcttcgaggtttttgtttgttttttcaactgctcattaagacgtcctacaccttagcaaaaagatcacacatatttcttcaatgctttggagccatagtcatgtactcaaaatttattttatctctactcccacccttcctccacccaaacttatccttgggttttcactgattagtgctttcaagcctgcctgccttagttcatgtagctcctcctctggtactgggataaacacttgtattaccattttaaaggctatcattactctttacctgtgaagagtagaacatgaagaaatctactttattcagatattctccagattcctaaagattagagatcatttctcattctcctaggagtactcacttcaggaagcaaccagat

SEQ ID NO: 13950 - DNA, 906 bp, Homo sapiens
ttgtgcagattgcacgtacttttcctcagtttgaagtaaatagtggacaggaaaaaatattaaatgttggcagtaaatatggaaggaaattacaactaatgtaatatgctaaaacatgctatgtttattttactaatttgaattaaaatgtaagaatttaaaatgccctggaaaaacacgggcattgatctgacgtctgaagttttaaaatattacacactttgaaatagcatttgtaccttgaaatacctgtctctatatattttttaaaacttcctttttctttcattccatttatcatcaaataaaggatgaacagatgtaactcagaaactgtcaagcatgctgaagaaagaccactgcagaaaaatttctcctagccttttcaaaggtgttaggaagcagaaaggtgatacagaattggagaggtcggagtttttgtattaactgtattaaatgcgaatcccgagaaaatttcccttaactacgtcctgtagttatatggatatgaagacttatgtgaactttgaaagacgtgtctacataagttgaaatgtccccaatgattcagctgatgcgcgtttctctacttgccctttctagagaggtgcaacggaagccagaacattcctcctggaaattcaacctgtttcgcagtttctcgaggaatcagcattcagtcaatccgggccgggagcagtcatctgtggtgaggctgattggctgggcaggaacagcgccggggcgtgggctgagcacagccgcttcgctctctttgccacaggaagcctgagctcattcgagtagcggctcttccaagctcaaagaagcagaggccgctgttcgtttcctttaggtctttccactaaagtcggagtatcttcttccaaaatttcacgtcttggt

SEQ ID NO: 13951 - DNA, 970 bp, Homo sapiens
agactcaaagggaaagtaacgggcccggtagcatggctaactaataataaaacaaatctcagccaaggggcctttttatctcggggccctttccaccaaacttgcatggcttcagtggaaacctaacaatgcggcagcggggaggctaagcggccgaggttccaaaacaacgtctggcaccttctaaaagtttaacaatgaaccagcctctaaaattaaggtttaatgaaaccaaggcgctttctttcgtgaaggaattccgttggcaacatctttgcagcgatgccccgctttctggaacccctccctgcccagcgcccccttcattttagtcctcccctcacgctcccacctctcctctcccattgtttcgatctactcccgctgaggcaagctgggaagtgtagttgcacgccctgctgcctgagtcggttaggtagctctaaaaactcgtaactccacaacagctcaatggattttcgagaggtggggtaaagcctgaaggctcagccggtttatccaacgagcaatctgggatttgcagtttccagcgcccgaagtgcgcccgctagcagagagctcttggactctaatcccgccccctccccgagcctcgcgcatcctgatggcgtcacgcggccccgcgaggtctgtgggatacatagtagtcctcaaggcgggtctcactcttggccgctgcaacttgaggactacacttccaaggaggcagcgcggcgcgccgagaaccacccgaggccgtgattggctggtgagccggccgcacgcggaggatcctaaggagcagctctgttgcgacataggccgagcagcgaggcccagtgagttaggggaaggggagctgtagggagagggtccccgccggtgagggggaaagagaattagaagaggaagcagggacggggtttggatggagggctctgcgagggggaagatagggctaagggagaga

SEQ ID NO: 13952 - DNA, 1053 bp, Homo sapiens
tagacgcagtatcctcagaagccaggggtccttacagtagccctcgcgggccccagcgcccacccagagcgaggggcctccgacttggccccggcctggcacaccgtcccggaggcccatcccggccgctcctccaggtggggcttcaccgccccccgccccgcccccgagaccagcttctagaggcgccgcccggtttcccctcgcccctgcctctcacacgcaggtaggctgcgggccccgagattccccggcccccgggcctccccgcgccgctcgcctctctccctcgtcgatgggccggggagcctccgcggtcccggagcccagcccggcgcgcggagcccgctcaccgagtttcccacagtcaacgtgcaggccccgccgcagcaacagaactctcccacagcagccccggccccgcccctcataccgcggccggaaaccggaagcgcccgccgggcaccgcccaccagccctcgcgaggccccggaggctccgcccacctccgcttcccaccccgccccggagcggagggccggcgctccgagcgggagaggaagaggcgcctcgggctccgggcgagcagggcggggtggagcgagcacgcgggcggggcggggcggggctttgtcgggccggcgagggccgcttctctagtccgcgcggccgtcccacgtctctgtggtgcgggaggggccccgccgaggggcgagaacgggaggtgggggtgtgggcgggccccgccgaggggcgagaacagggtggggctcccgcgcccggactccgcccctcgcccctcctccgcctcctccccttcccccgactcgcccctggggaagagtgggtggggattctgggccggtggaggagtcactgtcgcttcagccaggctgcggagcggacggacgcgcctggtgccccggggaggggcgccaccgggggaggaggaggaggagaaggtggagaggaagagacgccccctctgcccgagacctctcaaggccctgacctcaggggccagggcactgacaggacaggagagccaagttc

SEQ ID NO: 13953 - DNA, 1088 bp, Homo sapiens
tttgaagtgaataactggcccattctaaaaaggttgacctcatctttcacatcttttgttaattttactaagtctattcatatgtgaaaaaacacttcaatactggatcgtgaacaatatgtaaaactgctttggtagcgcagttactgctactgaacattgttatatatgctattcaaaataggtgcaatagttctgcataccgtttccttgacacctcccattgtatccgaagttgttctttaatcggcacacaagcacttgatacttactaaataacggcagacacaacggactgtaaactttggcaaggcctgaggcttaaacgctcaataagtaatttactgaatgaataaacagatgaataggttcagttatgaactagttgtcacttgcctgcaagttaggtgagatctagggcgagactattcaacctgcaaccatcattactaactgaatgtcctgttacctaaaaaaagatagaaataaagcccatctttagggcagaattcaactgccggacttgggactggacgccaccaagtggataaaatatggagctcggaaaagattggattcccggccctgaactgaccacacagttgagaggaagttgaggcctagaagagcgcgcaacagtaagccgtgtcggcaccagactctgttggtcctactgacacctccagcgttagaatgactaaggctccactcctgacccaccggccttgaggaaagcgcaaacgtaaaaaaagattgaaaccggagaggcgaatgcatctgtttacgctaggaccacgctcgacgtcggagaaaagcccacacactcacagtttccagacctggctgcttgccgaaactcagattctcggcacctccagcagctggcttcgccaacggcgttgaacaagggtcgcagctcaatgacgtcatatctccctacctacctccagggttccgcctcacgctctatgtcgcgcgcgcgcactacgtcctatggcttgcgcgtgcggcggctgggcaccgccattttggccggtggccgtgagaacacgctgtgtggctgaaaagtgaaggcaagagctgatttg

SEQ ID NO: 13954 - DNA, 1079 bp, Homo sapiens
tcccagacagtgcaaaggtaagtgggggccgttcccattgctacagagccccctgccgccctccagagccctgctgggttaggggacacgggtgccagccttctctgggggccgactgctgtgcagctccaggcctgcccagcttccccagggatgcatagggtggggagagagagcccctcagggcccataacaaccctcctggctggggcagtggcgctgcagcaggcaggtgcttgtcatcttcagccttccaaaggacccagaagtttccttgacaggctttttaaaaatttgtttcaactgtggtaaagtacacaaaacataaaatacagcattttaaccattttgaagtgtgcagctcatgggcagtgggtgcactcacattgctgtgcggctgttgtcaccgtccgcctccagaactcttacctggcagagcggaaactatccccatgacatgggaatccccatttgccctcccccagcccctggcacccaccattccactttctgtccttatgatttgacaactctagggacgtcctctaagtggagtcagactatgtccttttgtgactgcgttttgtcactccacattgtgtcctcagcttcctccgtgttgcaccctgtccgaattcccttccgctgcaggctgtgacattccatgcatggaaggaccatccttgacaggctgtgtgagctgcccttccccatgcctgccacttccagggatgacaagctgacccctgtccccacacaccccacccttatagcttattgctttgcgttggtccaaaaccacccgctcagctgagcctctgggatgaccagagctgatcaccagacagctcaaggcgggcctcccccctcctatctctttccaagctaaacacaagcagttctacataaatatgttatggtaaataatgagatagtaaatatgctgtaacagatcatcaaagggtgaagacccgtctccacgaaccgtgcatcacctctgccaccccatccctccccccacgacccccctgctcttccaccggggcccccaccccattctactgaggcatgtgtcctcg

SEQ ID NO: 13955 - DNA, 940 bp, Homo sapiens; identical to SEQ ID NO: 13469

SEQ ID NO: 13956 - DNA, 1082 bp, Homo sapiens
gctgcttgatttcttgtggttttaacacacacagactatcccgggagcagcggaaagaagactggctccagggttggggcctagctttgtatctctgttttgcttatatttaatgatgaggatttaggtatatatgtcatttctttagcatgtttcctcatctgtaaaaagttgaatgttatcatcttaaagtcccatacaactataatgctctatgattgcagttcagacttacaatggttcaacttaatgatattttgactttatgatggtgtgaaagtgatacatattaggtagaaaccatagtctgaggactcatacagccattctgctttttactttcagtacaatattcaataaattgcaagagatattcaacaccttattataaaatacgctttgtgatagatgattttgcccagctgtaggctaatgtaaatgttttgggtacacttaaggtaggctagactaagctgtgatgttaggtaggttagatgtaaatagatttttgacttacaatattttcaactttttatgggtttattgggacataacccaatcagaagtcaaggagcatttttatttcatgtggtagcataacatgttaaactcacattttcaacatcaaccagccaatgtaccctcaaactactcacaccttttaactgattgtgtaaaaaccaggtcagcagaaggtgagtgctcttggcaggatgcatgcgccatcctggagctgactggattgctgacgttcacagtatcagcaacgcgtattctccatgctgtcttattttctctggcagatccatgttgacggggctccaccctcccacttctggaaccatcatcatcaatggcaagaacctacagacagacctgtcgagggtcagaatggagcttggtgtgtgtccgcagcaggacatcctgttggacaacctcaccgtccgggaacatttgctgctctttgcttccataaaggcgcctcagtggaccaagaaggagctgcatcagcaagtcaatcagttagtaaacagttgtctctctgctcctcctgcctctgcccattgtgtaaggaagtgaag

SEQ ID NO: 13957 - DNA, 1026 bp, Homo sapiens
cttcctctgtcctttcagcatgtagtaatttaaaaaacagactacatatagctctgtccagtatcacagtttggagacttttaaattcttatgggttatgtgttaaataataatttattcagttatcctcttaagttacaataaacagatcagttcaggattaagaaacatttgtcttgaggaaccaaaatgatctgctctttatactttgatccttgtttggcctttccattcttacagatttctcttctttccattaaattcatcttttgaatttgaggcattcataattaagacttttagctattcatttatttcatataaagtgaaatgtgagcatgaacgatttttcactcatccttgctcctcaatttatgtgtggctgggtatctggcttactaagcctaagcatcctcatctatatgataggagtaagagctcctagcttgagggattcttttcttatttgactttttgcagagatgagtctgtcttaaaatggacagctgtcccctaatacaaaaattcaaaaacggtttgagtgaaaacagtacaatgtctctgagccaataaaatctactgaatttttctttttaaagttcaaggggtcacccaacaaggaggggagtgcaactcaccatggggtttatacatggtcagcacacttcagttagcagatttttctggtcacacatcccagcatgtgataaccacaagactatgagataatcaaaagttgttccttattaggaaaaggccaaggatacttggattaatctgtgtttctattgcttctcggccttttggctaagatcaagtgtaatctgtgttcttttttatttggtcatatcttccattctttcttacctaattcctctaatatctctctgtgagcctaaaccaataattatatattacattctattgtctttcttatataactgcagaaagataaatatcactttgtttgttcctgtaggttttctttagtgtaatccatagcagttattgcattggagcagcagt

SEQ ID NO: 13958 - DNA, 910 bp, Homo sapiens
acagctgaggtgagaggaaagaaaaggttgctttcttaggaacaaagagtggtaccttcagtatcgtgggcaaagcttttccaagtccaacagcagtcaaaacagcgctttttataaataacactcagctaaaagtttctgggtttgtgattgttccaacggttaagctcggatgagggtccctggagtcgtagctcccgggaaacgtcgactggctttccacctggacttcatccgtccaggcagcccagaggggcttcaggccccgcccgctctcctgccaactacagcctcgcgactgcgctcagccttcaggccccgccccttcggtcaagcggcgtgctctcactgcacggcgcctgggccccgcgcgccgggacctcggtttcagccgtcctgtcctgccccgaggcccctaggccccgcccctgggccccgcgcgccaggacttcggtttcgaccgtcctgtcccgccccgaggctcctaggccccgccccctctgtccccggcgtgttctcgcggctccgcccctaggacccgcgcgccgggactttggcaagtttcagccgtccggccccgccccctcggtcccacggctctcgcggcccctcccctaagtcccacacgccgggactttggcaagtttcagcctccagccccacccctaggtcccgcccactcggccagcggctggctctcgcggccccgcccctgtgccctgcgagtccctattttgggagcattgcggccgccgtgccccgcccctccccgcgcgccccgcccctctggcggcccgccgtcccagacgcgggaagagcttggccggtttcgagtcgctggcctgcagcttccctgtggtttcccgaggcttccttgcttcccgctctgcgaggagcctttcatccgaag

SEQ ID NO: 13959 - DNA, 994 bp, Homo sapiens
tcagtgtgcaaaggataacatgagtaaggattttttgggaaatttttcacctaataggaagaatgctttactcttttatttatcaaaccttcctcatcattaaatggattcagtagtactttttggtaataactcgtgtgtgtgtgtatgtgtgtaataaagtactttgtatatgttcattgtgttctttttttaataagctgttttaatgaaaaagacacaattaccgtcaccattgcccactatataatgacaagtaggggaggggaggctaaaagagcttctacatagtgagagatcttccattgttatacctacgcttgcactttatttcattttcttccacgtttggacaggtcgagattaaatgtgattacatttccgttgagaggcttttattcagcaacaggattcaaaagaatgtcaatgagcataaaataaaaacggtgtgcaatttatatgaaactctgatttaaatggtcctaaccaaaaaaaaaaaaaaagaaagaaagaaaagaagctatttaaagtaaccctcccaaggggagtcaactgctcttcagtgtgccctgagccggctgtgccttctctccatccgctgctcagatattcatgaaccgttgcttcttccagcctcgccttctcgctccctctgcctttctggcgctgttctccctccctccctctggcttctgctctttcttactccttctctcagctgcttaactacagctcccactggaacttgcacaatcaaaaacaactctcctctctcaagccgcctccaggagcgcatcacctggagaagagcgactcgctccccgcgccggccgcggaagagcagccaggtagctgggggcggggaggcgtacccttctcccgctcggtaagagccacagcatctccccggagattggccgtatcccaccgtccggcccccagggtcctgcagcggtgatgcatatgtttcggagcaatgatggaaggagaaaag

SEQ ID NO: 13960 - DNA, 972 bp, Homo sapiens
ctggcgctactggagactctaacccgagacctgggccccacgctgctggttcatggggtcactccagtcacctgcactgatctgtgatgcccctgcctccagggctaggtagagagggcccaggcaggcggcctatcctgatccttggaggaggaggaagaggaggccactgtggcccgtggccctgcccttgggacgtggagcccaggggaggtttgaaggggatcctgggcttgggcatcacgcccacctcctttggcagagggaccccagcacactaactctgggtggctgtccccaccgtgcaggggagggagtccgcagcctcccttcactggtgccttgatgctaggggccaggcctcctctgtgactctgggctacctcagtttccccattttggccagactcaccggcccactggggtggtgatgttttcgttctgttttatttttctaactctgctgaccatgaataaaagaccaaaacactacaggctggctgagcagtgctggtgggtagctgagagggagggggtgggaatggagagctctgcagaggggtggagatcggagccttcagcctcccgccgcgaggctgccacgtgcagggctggggtgcggggcccggacgcatccgtggacttggaggctggctcgggcccgcacctcccatccccagctgcccgcaacccccagtgactcgggatcccccggagagccctcccctctcggcaggagggggctgactcagggagaaatggcagtttagggcctagggggccacgtgaccctcccccaggaatgtggtgacgtcatcggaggcgtggtcgtccccaaaattagggaggaagaggaaaaaaaaaagccagaaaaagttttcttttctggagtcccaaacgaggtgcgggacggaagagggggtgaaggccagaggctcggggcttcaagaccgctgtctggagtcccccttt

SEQ ID NO: 13961 - DNA, 1061 bp, Homo sapiens
aagaccaaaacactacaggctggctgagcagtgctggtgggtagctgagagggagggggtgggaatggagagctctgcagaggggtggagatcggagccttcagcctcccgccgcgaggctgccacgtgcagggctggggtgcggggcccggacgcatccgtggacttggaggctggctcgggcccgcacctcccatccccagctgcccgcaacccccagtgactcgggatcccccggagagccctcccctctcggcaggagggggctgactcagggagaaatggcagtttagggcctagggggccacgtgaccctcccccaggaatgtggtgacgtcatcggaggcgtggtcgtccccaaaattagggaggaagaggaaaaaaaaaagccagaaaaagttttcttttctggagtcccaaacgaggtgcgggacggaagagggggtgaaggccagaggctcggggcttcaagaccgctgtctggagtccccctttccaggccatgtcggggcccacctggctgcccccgaagcagccggagcccgccagagcccctcaggggagggcgatcccccgcggcaccccggggccaccaccggcccacggagcaggtaaggcagcccttgtgagacagaagagccacccagctgtggcgctcacctctgtcctaccgctccagcctcccgccctggctgcttcctcctgccccttccccaagccgaggcggggggaacagccgcctgcgctctcttgggaccctagatttgggggaggaggtaacgagaggcggagagggtggctcctcaaatatacacccctcctgtcctccgccaccccacctttgatttctcttccctcaacccagcactccagccccaccccagggtcaatttttgcccccttccatctgagcagtgttaccaggccccagggggaccggaggatcgggggccggcgtgggtggggtcccatggagtactccagcacacgcaggtgagacccgggatcgtggggtgggacatgtgggatcccccagaaccgagtctgagggacccaggaca

SEQ ID NO: 13962 - DNA, 1099 bp, Homo sapiens
tatatgtgggacagagccttggtctggaaaacactttcaagcccactgtctcactctcttgtcactataaataacctggtgagttggcagtcccggcgtgaatgcccacaatttgcaggtatgcaaacagaacagaggggctaagttccgtgggtcacatgagagctaggctgcagcgcctggggaggcggccgttcccgcccggtgcgcttgttgtccgctggagcagaggcccccgagcctgctgacctctctgccttcaggcctggtctcgcagtcccttgtgcctcgcctataggcaggcggaatccagagcgtgcagcaagcccggccggctctcggtggcggtttctacagcaggtggggcctggctccgtgattgagcggcctctacccctctatctggggcccagcagcggccccctcccagcaccctggctacacgtctaaccctaggctgaccaggtggggctctcggaggcgttagccccagccctcccaggagtcttaatgttcctctcacaggaaaaaacgttctgcgccctttgtgccccaaaccctcgacccttcactcggcgagaggggtcgctgagggagagatccacctctgcccttcccgttgcccgccggttcttcctcgcccgcctcttacgcaccccgctcccgccggctcctggaaagccggccccggccccagcgcttccctccccggcctagcccctctctcccacccttccgctcgcccaggccttcacgctcagctcccggtttttgttgcccgggcttgtttcggagctgagcgcgccgccggccgggcgccaggtcacgtgcgttggtgacaacctctcgcagggcggccccggggcccccgcaccgccgattggtggggcccggcctggcgcggcccggggcggggcagcggggcccgacggcgagcggagcggccgatcagctgttgcgagcgctgcacaacaacaaaaggacttggactggccggcctgggcgcagcgacccgagggctggagccggccccgcgcctgccgtctgggtacctgaacgaggtgcagcgcagcccggccccaccgcagctacctcagca

SEQ ID NO: 13963 - DNA, 1063 bp, Homo sapiens
tccgaatcctaagaatgcaaaagatgggccgggtgtggtggctcatgcctgtaatcccagcgctttgggaggccgaggcaggcagatcacctgaggtcgggaggttgagaccagactgaccaacaacggagaaaccccgtctctacttaaaaatgcaaagttagccgtgcgtggtggcccatgcctgtattcccagctactcgggaggctgaggcaggagaaccacttgatccctggaggcggaagttgcggtgagcggagattgcgccattgcacaccagcccgggccacaagagcgaaactccgtctcaaaaaaaaaagcaaaagatactaccaagccctgcggagcaaggtacctcacacttcatgagcgagttaagatgggtttcacaatttttcaagcaaggaaacgggctcggaggtcttgaacacctgctacccaatagcagaacagctactggaactaaaatcctctgatttcaaataacagccccgcccactaccactaagtgaagtcatccacaaccacacaccgaccactctaagcttttgtaagatcggctcgctttggggaacaggtcttgagagaacatcccttttaaggtcagaacaaaggtatttcataggtcccaggtcgtgtcccgagggcgcccacccaaacatgagctggagcaaaaagaaagggatgggggacttggagtaggcataggggcggcccctccaagcagggtggcctgggactcttaagggtcagcgagaagagaacacacactccagctcccgctttattcggtcagatactgacggttgggatgcctgacaaggaatttcctttcgccacactgagaaatacccgcagcggcccacccaggcctgacttccgggtggtgcgtgtgctgcgtgtcgcgtcacggcgtcacgtggccagcgcgggcttgtggcgcgagcttctgaaactaggcggcagaggcggagccgctgtggcactgctgcgcctctgctgcgcctcgggtgtcttttgcggcggtgggtcgccgccgggagaagcgtgaggggacagatt

SEQ ID NO: 13964 - DNA, 902 bp, Homo sapiens
caaacagaaagagaagatggcgttcttgcctggtatccgaccactaagcatgtactccattcacgcaaggatttggtggttcctaaaagtaaatactgtgtctctgatatgaataaaactacaatttcttctcagatattttacacctcagtgtgattgagtttagttgcttccctgagccagggtgaagaaagacgtgtgtgtgtgtgtgtgtgtgtgtgtgtgtgtgtgtgtgttgtggggtcagggtgaactaggtgcgtgtgtgtgtatgaatccgtgtgtgtggtgggtttcatgaactagaatctgtgtgtttgtgtgtgggtgtgttgggtcggggtgaacttgaatccgtgtgtgtgtgtgttgtggggtcagggtaaactggaatgcgtgtgtgtgtgtgttgtggggtcagggtgaactggaatgcctgtgtatgtcttttgtggggtcagggtgaactggaatgcctgtgtatgtcttttgtggggtcagggtgaacgggaatccgtgtgtgtgtgtgtttggtcagggtgaactggataactggaatccgtgtgtgtgtgtgtgtgttttgtggggtcagggtgaactggaatccgtgtgtccgtgtgtgtgtgtgtgtgtgtgtgtgtgtgtgcgtatgctgtggggttggggtgaactagaatccgtggaagtgctcagtctctcccgtgtttgactgactcccggccgcatacccagtccctgacacacgggggcgcacaacaaatatttcccgaaagatccaggagcagcatctccaccagcaagctgggctgctgggtgggtacttccttcaaagctgagggagcgtcctacgcccacgcgcgcaggagggcgccccccgcaaagcaacgtctaggagaccacag

SEQ ID NO: 13965 - DNA, 1008 bp, Homo sapiens
atgtgtcttccatgtgtagccctgtcctgcagggacgcatcgggtaggtggcaaaggggtgcccaatcctagcgaactttcaactgaggttgggggagaagggcagggaccctcccaccatgagaatcgtaaggtaggactggagaaaaagatcagagcacatctctcatgtactctagaactctccagaaacctctcactttctttgtccccatcttctgcaggggacttacagcgttctcagggactgcaggaaataagacaaatagggaaaaggaaatcacagagcacgattgaaatatggcagatgagatgctagactggaatcttctctttcgctcaaaataaatgcatacataaatgacagtgattgtaagcctgacagcacttcacccactctctaaagtctcctgacagtgggacctcaagcaggggactggaaggttaatttgttcggtaccaactctgactcaaaaagattattctcctgtgaggtgaaggagaagaaaaaaaggtcagtgacattttccagccactacacccagagggtaacccagatgttggtgggatgggtgggactcatcaaacccacgctttcccccaaggttgctaagacagagcgtcctgttagtcttcgggttgaatcaaccccacaacgacccgttctaaggagactgtgacagcaggaaaggtcatgacacacccaggtctggacacgctgtccctgaggccagtgcccggagcgccccccgcggagccgctctccaccaataagagcctgaggtcccgagatgatgagatgcggggccgctgctcagccaatcaggctccaggcgcggccagggggaggagatgggaggagaggccgggggcgatggagacgcggatacatcaacagaagtttctcacctaggaatgcgaggggcgctcccgcatctcctgcacatctccacccctgcgcaggaggagatccccaggctgctctctccatctctcctacagctccct

SEQ ID NO: 13966 - DNA, 704 bp, Homo sapiens
tacaaaccattacagaatgggggccatgccaccaggtcaaacgccctcacccagagccaggcagttaggaagccaccacagggcttccaggagggcaactgctatggtgtgggtgccttgtgtgcttgcgctcttcaggggccctgctccacttctgatgctcctcaggtgagctcggtgccaggactacagcgacacggacctctcactgctgcacccttcaaagtccagcagacaacccctcgccctggggtaggagctcctctactcagctcctcacagcacctgccatcagtggggctggggaggggaacgttgcccatgtcacatcaactcacggctggccccacacagaaagggtcagcttactgggaactaactggaccctgaaataaacggaaagaaccacagcctgcaaatacctctaagcctcactcaaagcaggtcatgtttgctcatgaccaaattccggaagactgggaggcatcgggacagactccagaaaggtactggtggcaggggactggtctgctgagtcacagcaaccccacgctccaggccgtttgttcctgctgctccctttgggattaactagagattgaaccggctcaccttgtttcagctcaggccctgcaaccgaccgaccgtctgctgggctccaagtcacctgagaggcgaggtgaggtaagacggacagtaggggt

SEQ ID NO: 13967 - DNA, 1045 bp, Homo sapiens
aatggaaggtggtgaaaaggaatggagaggccagggcacgactgcgggattccccttacggcatcccaccctgggttcgcccagtggccccatccgcacccgcgaatgtgacctgcagacactggccctttaaaccgaaggctggcggcgcggggtgtccatgtggagctgctccatgccgtgttgtcctgcccgcccattggctcgcggcccggtgacgtcccctaataggatgcgaacgcactgcggggggaggaacggagacaaaacgcggagccggactgccgctccgctccctccgctggttctcttgacagtctccagtcgccggcagctccgcccaggggcggatcccgggggaattgcgacagcccggcgattgcgggatttaggtcgcgagtgggtggagcgtggagacccagggtcaggccagtctctgccattcccaaggtttccctgacccggaatatcctggttggaactctgttaaatcttgaattgttcaccctaccctccctccagcaggacagatttcgtcgtgaacgacccaaacgcaccgccccggcccaacttgtggcttgcagccggggcggggccagcaggaaagcggaaccgcggcgcgcacaccccgctcggacctctccctccctgcccgggccacgtgtgcgcgcgccggatccggggggcggggccagcagcgcaggacccgcccctcccttcgcgagacgccgcggccctgcgggcgggggctccggtccgggctttggctgtggccccggtgtagtagcgggggcggcggccgggggcagcgcggctccttcccttgttgtgtgtgtcggtgcctcctcgccatcttgttgcaaagccctttcttgtcggcgggactcccgggggccgcggggcgggaggcatcggaagggaggtagagagggaggggaagaagggaggcagtgccgccttttttttttttttgcatcccatttttttaaatttgcaattttatattttgcaaatattttgagagacattgatttttctccccgtg

SEQ ID NO: 13968 - DNA, 902 bp, Homo sapiens
gcagtgcccagtttattgtctttattattcttttgtcatgggtgtaaactccatttgaaaacataatcagggagaatacccaagacaagaagaacagttgtcatttaaaatatttgaaaagccctgccttaaggacgcattcgcttgccggtccactcttaattggagacttgcggtgtagcaacacgtgagagtcttcttgcgttgagaagtaagcctggaaaggggcgaaggccccgggcgcatcttcagatgcgtatttgtgggcccctggggatataaacagcccagcgggtgtaaattaaaccccgcagtgccttggctccctgagacccaaatgtaagtcagaaatgtcccaagacttcgcctgccaacggaattaaattttagaaagctccacgaggtacacacgaatgcggagcgctgtatgccagtttccccgacaccggctcgccgcagggagacctcaccccgagagcggaaggggtaagggcggcggggtcaaggagatcgggggtgctgagttggccaggagtgactggggtgaccgggggtgctgaggtggcctggagtgccggggtggccgggcacaccttggttcttgtagacgacaaggtgacccgggctccgggcgtgcgcacgaggagcaggtgcccgggcgagtctcgagctgcacgcccccgagctcggccccggctgctcagggcgaagcacgggcccccgcagccgtgcctgcgccgacccgcccccctcccaacccccactcctgggcgcgccgttccggggcgtgtcctgggccaccccggcttctatatagcggccggcgcgcccgggccgcccagatgcgagcactgcggctgggcgctgaggatcagccgcttcctgcctggattccacagctt

SEQ ID NO: 13969 - DNA, 931 bp, Homo sapiens
aggtctctcgaggagaaccctaacttcgaggttccccgtctgctttaccctccaagaaaatcccagggccggctaacttgggcgccgctagcggagaacggagtgttcaccccggagccgaagtgcagtagacacttagcgactttccgtggcgagtctagggtctttgcctggcgacctcattgtctgagcgccccgtaccgctcaccgcccacctccccgccccctgcccacccggtgggtctcgctccagttgggggtggggagttgggaacagtgtgaatgggaagggggtgaacaaagccaagctcccgccattctcctccgcctgcaccctctccagctcgatgcgcccggaggccggggcgcgcccccagcgcactgacgccggaccccgaggagaggcgggcgcaggggaccccagagctggggtagtgcgggttcgtggcgggggcttcggcagccaggaccccggaccaccttaagagcgagccccgccccgagcccggaacttgggcggcgctgattggtgcaaatgtaatggctgaaattgattgctgaaatgcaaaacttgttgctgcttctcccggcgctgggcgagaggcagacacagagaggggagccgagaccctcggaacgccccacgcagagcccccccgctagtcgggagaggggtgcgcagaccccccagagctgcccccgcgcccccctccccccattccgggctctgagagcgcagcgggaacgccttagcctgctcgcccggcgtggccccccgacccgcgtacgcccccctccctcaggtccgagagggactcgcgaagcacctcagcgcggaggcagggaaccggagccttggagcgacccaacccctcgtctcgctgccctcccgcgcctgcaacggtgcgcggagactccggcgaactcagac

SEQ ID NO: 13970 - DNA, 1253 bp, Homo sapiens
ttttagtcggagtttcgctcttgttgcccaggctggggtgcaatggcgccagctcggctcacagcaacctctgcctcccgggttcaagccattctcctggctcagcctccgagtagatgggattacaggcatgtgccaccacacccgtctaattttgtatttttagtagagacggggtttctccatgttggtcaggctggtctcgaactccggacctcaggtgatccgcccccccttagcctcccaaagtgctgggattacaggcgtgagccaccgcgcctggccggactttggcttttactaagagtgagatgggaagctgttggaggatttgagaacctaagcgtcatgatctgacttgtcataagaggattcctggaactgctgtgctgggaatgccagtgaggttgctactacaataacctaggcaagagatggtggctcccaaagacacgggaaggagcagctctggggttggaagataaaatttggggtctgacagctacattggagaagcctattagccattcgagtgaactgtggaagaggcaactggatgtatacaggtccggagtctcggggaagatcagagctgggagctggcacttggaactcaacaaatagtatgtattattagcagtaatatggaaccttagctgtactactacttactagtagcgagctcttgagttaaccatttttaggttctgggcctcagtttccctgtgaatgaaatggcgaaaacactcccacataacgggaccttgagaacgaaatgaaaagtatcaagggctgaccgtgagcaaggtgagagccatgagccaaaaccacacgagcctctccgggaggggggggtcactgctgcggaatcagcgacaggtttccgaatccacggcacacgctctgaggtaccagaggtagcaaagcaaaataagcgcggggtcccgcacggcagcgcgggtgcagcgcccaaacctcgcgagatttgttggctgggccaagtaccacccaccaaatctcgcgatacctaggcgcctgagaggctctctaccggtgagggtttgcggggaagatggagtatcccgcgccggccacggtgcaggccgcggacggcggagcggccgggccttacagcagctcggagttgctggagggccaggagccggacggggtgcgctttgaccgcgagagggcgcgccgcctgtgggaagccgtgtccggtgcccagccggtgggtagagaggaaggtgagt

SEQ ID NO: 13971 - DNA, 1100 bp, Homo sapiens
aattcatgaagtgcctgtgacctgacgttgaggatcacatgggactgtcgtcatcatgatctcgtccccaggctgccccggcggaactgtccggtcagcgtgactgtttggctttctgcagccatcagcaccgcacgggctcaccagcactttgctcctgagggcacagccggagcccctcctcactgcaggcagacgcagcctctgctgccacgaagccacacagccctgcgcttggcatgcggctgctttttctgtgccagctcacgagtgccaccggcacagtctgtgtcacctggcagggccaacaggttttctgcacagggttgccacagtgttcctgcatggcggtcctgctcctggccataacatccttctcacagggcttggtgatcctgaccctcccagaggagctcactggcctgcagtgttgtcagtgtgatgctggtggggatctggtggtgagagcacagcatggcttcagtgtcttagagactgagggagagggtggagctcagccctcccctggcacagttctctctcagaaggaagtgcacggtcactggaggggcagacttcatataaatcaccaatcactgtgctgggactggactgagaaactgtcggctcctgggaagtaaagagaatgtttacagaacatagggatagcagatataagggaccagctcccaccccaggaccaaggtggagcctcgccagagcgtctctccagaccgttgggcggagggtgtggcccagctcactgaacgtcagggaggttgctgtggtgccacacggtggaatgtaccagcatgctgggaaagcctgtgcacaacagggtgactcaccgggcgtttggctgcaacacccccaagaggggtaccagggaacctcagtgtccacccagcaccctgagctggcaagggctaggctttgggctggcaaagggagagcagttcaaggctcagctccgtcttcacagcgcggtagaagacggcttgggggctgaggggcagtaaatccacagctggcatagaggagaagccggcgggtacgtgcccatcgttcaccatctcttctaaacacgaatgaaatgcgtg

SEQ ID NO: 13972 - DNA, 948 bp, Homo sapiens
aaaacttgctccaaattgagctgcgagtttcttgcagggtggagctgccctcggctgagtggagccaggagggtgaagcaggagtgtgaacggtgtgaagcacccattacaaatttctggccgccatcctaattttagaggcttcatgtttcaatatgaaatgctgttgttcgtgccacaaaaggaggaaacaaacagaatcgtgccaggagaaaccccctcccccaccaagtttgatgctgtaaaaatgtctaatggggaaatcttttcagtggtaaattaccccactgccttcttttcctcttattttgcatcggaagctctcctcagttcctactggaagatgttcaaggctgggccaggagaattctagagactttttcccctaataggcaccgtgtttgtggagaagtccactaagaatcccagacttgacatagccctggcattcagcggccgcctcactcccatgtggagtgaaaaccaggaagacagcagaaggtggcaaacccactgtcaagaaccagagtagcaatttcttgccattgtagtgataaattgctacactggctgaactaaaaattgtaataataataacaattaacatttatgcagcatgtacaatgctccagtaaaatattcttttaaggtcacaatgtacctttatcatgatgttgtcataatgtatccacaataatagcagcactagctaacatttattgaataattactgtggttactttatctgcatcatcacattaatctttaaaacttcacaacaatgctttgagcctggtgcttttattattcccattgtacagttaataaaacaggtttacgtagttagtggctgagctgggttgcagactcaggcacgtctgaatccggagctggggttcttacccactccagtgactgcctctcagaaaagaacagggcaatgtccat

SEQ ID NO: 13973 - DNA, 920 bp, Homo sapiens
gccactcggtcactgtctctattttatgatgagaaccaggagggtgtgagatttgcctgcatcatgggcagctggtttcacagccgggactcttggcttggctctgcagtgctcggctgcactgaaaaaagggccagctatggctctactttccctgtcagcttgtcatctgctgctcttgaccttggtcttgtctttgcagtgtgagacatccatggatggagaggcgggactctgctggtgcgtctacccttggaatgggaagaggatccctgggtctccagagatcaggggagaccccaactgccagatatattttaatgtacaaaactgaaaccagatgaaataatgttctgtcacgtgaaatatttaagtatatagtatatttatactctagaacatgcacatttatatatatatgtatatgtatatatatatagtaactactttttatactccatacataacttgatatagaaagctgtttatttattcactgtaagtttattttttctacacagtaaaaacttgtactatgttaataacttgtcctatgtcaatttgtatatcatgaaacacttctcatcatattgtatgtaagtaattgcatttctgctcttccaaagctcctgcgtctgtttttaaagagcatggaaaaatactgcctagaaaatgcaaaatgaaataagagagagtagtttttcagctagtttgaaggaggacggttaacttgtatattccaccattcacatttgatgtacatgtgtagggaaagttaaaagtgttgattacataatcaaagctacctgtggtgatgttgccacctgttaaaatgtacactggatatgttgttaaacacgtgtctataatggaaacatttacaataaatattctgcatggaaatactgttatctctgtgg

SEQ ID NO: 13974 - DNA, 1093 bp, Homo sapiens
ctcctaattgtgcccactgttctgtgcagcgcggaccggcgcatgcagcgagcggggctgcgagggcgctgctgtggccaggcgtctggcatgctgaccacgtcgcgctgctgtaaaggaaacctgccccgcgcagcggcggtggctggagcgggagaaaccggactttgtgcaactttggccatagtggccatcccatgaatctgtttactagcttggtggtgggtccaacagagcttgttgctccctagccgcttgctcgtgcccttggtggttaccggtagttaagcttagggcgcatagggccctcgtggctcgccacctctcacggttcagtacccacgcttcgaacgagggatgggagcaggcgccacggccggcaccccagagccctgctgccccttagttcgagcggccatcctcctgtggggcttgtgggcagcctgtggggtttgtgggcggcctgtggggtttgtgggtggtctaaggaaagagttggggcactcaggggtctgctgtttttgcccgtggccttaactcatcaggggagggtttctgcagcagaatctcgggctcagggttggcggttaacgagggagcagcggggtcttggggagggggctcgacacccctgaaggtgccccctaaaggagccactgttagaggggcaccccatctttgtggccatggcggtggtagagcggctgggaggggctctgcggcgagcaagggagcaggcggtaggggttctgcggcgatgggcgggctaggggcggggcgcgggtgggctctaaaagtcggtgcccactcgctccgcgctgccgcggcaaccagcacaccccggcacctcctctgcggcagctgcgcctcgcaagcgcagtgccgcagcgcacgccggagtggctgtagctgcccggcgcggcgccgccctgcgcgggctgtgggctgcgggctgcgcccccgctgctggccagctctgcacggctgcgggctctgcggcgcccggtgctctgcaacgctgcggcgggcggcatgggataacgcggccatggtgcgccgagatcgcctccgcaggtgagtgtgcggtgggaac

SEQ ID NO: 13975 - DNA, 940 bp, Homo sapiens
ctccccttaattacttcctcccctgtgcgccctcaaattcttgtactcattcaagcagtatttattaggggccagctttgtggccggcaccgtggcgggctctggggctacaaaaggtgaataatacttgggctctgcctctgagggccttacacgttagggaggagtgggtcaactgccacaaacgtcgctaggaaattaaaaggaaaattttacaaagtggcagttcttgtctgtcttcccctccagatggcccgtgtgttgttttcgggccggggctatttctcatttatttcgcacccccggttcttagtgccctgtaggtgctaaatcagcatttgtttcatgagtgctttttctgggggcaaccagacccctgcagaagtgtacctgtgttgtgccagaggttctgatgataggcttataggcggtagtttcctcagtgtccgtgggtcgcccccggtcccgggttggatgccccgcggtccagcaccgaacctttcggggtgcagagttgcagagccgcggagggcccgggccgtgcgcagccgaagggaggcctgcagcgccccctctggatgcagcgggcaccggccggccgccccgctcacccgctcgcaccccacgtttgttcaccagtatttcagtttacggtcagaaaatgaacacagacacttcgtgatactctacacttttcaaaggcgtaagggatgccttttaaaggattatggattagaaaaattcctccctctttcttgtgcctctgggcccttgcattgtgattctatcttacgtaaataaagggggctttgctctcctaattgtgcccactgttctgtgcagcgcggaccggcgcatgcagcgagcggggctgcgagggcgctgctgtggccaggcgtctggcatgctgaccacgtcgcgctgctgtaaaggaaacctg

SEQ ID NO: 13976 - DNA, 971 bp, Homo sapiens
ccagatagctaggtgtggcctaaggagcttgcggcctacggaaggtgtggccgaaggagaggggaggggtcatctttaatgatgatggaggggaggcattggtcatatacctgagagtcaagctttgttcatcgtcagatgaaagccaacttcttccaccagattgcctcccagctgctaggtagtttcctgtggtacatcttaagcggtaggttgggataataggtcccttccaggtcttaaagatgtggattaataagaacagaattttctacaacaataaggaggatgtcccctattttaggtgaataagcgtattgcataagcacatgggaagaaaggttaagaactctaagaccgtaaatttccagttgtagaagcctcttgaaggcggaaagcccttttttgaaaattataggcgatatgatctcctccagtggacctagcactgggttaagagtctctccagacttgtcactgcaagtcacgtaccttttctaggactaagtttcttcactggaagatgaggaggttgcactagatgacctagaaattcccttccagctttaaattccctcttgtgtcacttgctggacttgttctactggacctggcgctcccctgctcctcccttagctgctacgtccgcatcccgcaccagagggcgccacaggctggcccggggcagcgtgcggtgggcggagaggcagaattaggggagtctccaggaggcgtggtgattggccgccgccgggcggaagggggcgtggggagggaaaggccgagcagcgcggtgacgtctcgctggcgggggcggggccgggccgcggagcgtgtgacgctgcggccgccgcggacctggggattaatgggaaaagttttggcaggagcgggagaattctgcggagcctgcgggacggcggcggtggcgccgtaggcagccgggacaggtcagtccgagacgagagaag

SEQ ID NO: 13977 - DNA, 1076 bp, Homo sapiens
aaggacagcacgagcattctaacttaaggactggtttaaatatgacctaatgaactaaatatatttctgtctggtattcttaggttactttacttctaaggttgtttgaatgcatttatccagctctcctatcaaatacatgccaggttaaccctgtgaaggttttcctgtatgattctgagaatttctttataagaacagggtcttgatagtgaaggttctttccccaaagtgcaaggccttctattttgattcaatatcaacataatgctttttttttttttgaaagtgacttaagtactaaagattatcctcaatagtaattctacttagacatattttggttgaagaaatttaaagagtttattttttgtaggagcactgtgctgtgatcatgaaatttttgcaaaactaacagaaaatgataaacagttaagaacttccagctagaacaataggctgtttcctttttttaagtcagtttgtcatccttgctgattgacagtctccaattgttttcagaattattagtctcacagtatttcagaattacgctgtataaaaaagtacattaaatttaaacttaataaaataagtttcgcaagctcagtcaagacagggaagtgagaatatgattattcttccaaatttactatttccaccagcggtctcagttcagcatctgagaatatgttaggggaaactcagcaagtcagttccttttgtttttctggcctctgacttacttggatgggaaatagccaaaaaaaaaaaaaatgctgaatatctcagatataggtaatgggtcttcaccagaacataaaaatagacccttattagccatatcagtaatgtgctgtgtgggggattttttttttctttcaattcctctggcaacaaaccacacactgggatctgacactgtagagtgctttctcttctctttttttgggggggggagggggtgtggttgcatatttaaactctcacgcatttatgtactgaggactgcagtgtaggactttcctgcagaataccatttgatcctattaagaattgtccaaatgttggagcat

SEQ ID NO: 13978 - DNA, 945 bp, Homo sapiens
tttccagtttctctgttcacttcgttttagtatagaattagagattcttaacatataaatcctagaaagtaatttagaaatcttgtcattatatcttcagagtaataactttcatcacagggtctgtttgggctgagagtagagctttattcatgtttaccagaagtcccaagcaaaaattttttaaaccaagtacattctacaacccttcaaaaagattcaaaaaacaataatttaaaccaaagaactctggcagtgcatgacattttctgcctcattaaatgaggcaaacaaaaaatgaccaaatgactactgaaaacatagaggagaaaaaatactaagaaagtttacagagactttccagtaacaaaagttactggaacaaaaatctgttttgttgactcaatagtaatcaatattcacttttatgttgttttatgcttaagacaggaaaacctgagccttcctctttactatcagagcaaatggtaatcatgaagtgaagcaaattgattattgattactgattacttgaatttctatgttttataagtagagcaaccatctgttaacaggaataacaggttttagcagggaaaggattaagggttttattttcctcaactgaggcccaaaatgagtgagatttttcaagttaactttcattccatttggctcaggtgtcagggatctatatttaacttgtgttaggcatgcgtccgaagagctggaaggctgaggatgtcaatggctttcagatgtcaggataaccttaaggatagatgaagggttgagagcctgtgcctcatttctgagttctcagctgctatgccgtggaaatcctgtttactttctgcatctgctcctgcaagactctggagccagtcttgaggtcctacatctccgaaagcaagctcttctagaagttggtgagcagaatgcttt

SEQ ID NO: 13979 - DNA, 974 bp, Homo sapiens
gttccagactattgactgagcccgcagctgagttggctccagcaccctggccccctgctccatccactcactgggactccccactgcacagggcaacctctccaggggcacttgggctgcgaaggggagagtgggtggcatcccaggctgaagcttcctgagcagggccagaggaggagccagtccctgtgggcctctgttctgacagtgtcaacctcagccaggcttgtgtgggccaggtgtactgttctggttcagatttcaaggagatagtcagggcaggccgcgccaaagccctccgatgggctcccctactgcctggcagacctgtccagctttggactctggccctgcgacctggaagtcaggctgccaagaggtccaggcagtggcctccactgtggagggtctctggagagtttacagccctagataggggggttagggatgtgagatggtcccaggggcctgctcctgagccacgccaagctgcctgctccctttcctctgcttccagactcacgggatcctctgctcatcagaacaggagtgtgggagaccctgagacactgccccaggatctgaacaggtggcaaaggcttaacaggctagcggtcactgtagtgacaaggcgattgagtggtcaccatggtgatggggatggaggctctttgccaccagtcccagttttatgcatggcagctctaatgacaggatggtcagccctgctgaggccactcctggtcaccatgacaaccacaggccctctcaggagcacagtaagccctggcaggagaatcccccactccacacctggctggagcaggaaatgccgagcggcgcctgagccccagggaagcaggctaggatgtgagagacacagtcacctgcagcctaattactcaaaagctgtccccaggtcacagaagggagaggacatttcccactgaatctgtctgaaggacactaagccc

SEQ ID NO: 13980 - DNA, 994 bp, Homo sapiens
tgtgtggtatttcgtgagtttggcagtttgtgaaaaaaaaaaaaaaaaaaaaaaaaaaaaaaagctgcctgctctgagcccatggggcaggggcaattttttcatctgacaatctgcgtgcttttgttttgcttgcttattttggccccacaataccacacccttttcttaactaacctctttctacctgggctggacgtgcctgggctctcctccctggccccgctcccacctctcccaggtctctaaacccctagagaacctgtgtcagtgttttgaatccctcagttgctctagcaggaaaactagacagattaggagctggggcacatttggctgaaagacagctcttcgctttcttcttatgctgcttccccttcctcttttcccaaatagatatataaacacatgtattttcctgtttaaattgagcgaattggtcccctgcctgtgccttgatttagccattgggctcagccttgctcctcccttccttactcggataggagccactgggatctggagctccagcttccaaattgaagctggcctcaggccaggtgaccttttctttgtaagtttctttcctaagcgtggggttggggggaggcggggaatggggggggttgcagggatctgtttggtgctgttgaagggggggcgagtgaggaaaggagggggctggaagagagtaaagggctgttgttaaacagtttcttaccgtaagagggagttcagacctagatctttccagttaatcacacaacaaacttagctcatcgcaataaaaagcagctcagagccgactggctcttttaggcactgactccgaacaggattctttcacccaggcatctcctccagagggatccgccagcccgtccagcagcaccatgtgggtgaccaaactcctgccagccctgctgctgcagcatgtcctcctgcatctcctcctgctccccatcgccatcccctatgcaggttagttcccttc

SEQ ID NO: 13981 - DNA, 966 bp, Homo sapiens
gtgctcagtcatagggtgatggtggcaccagcgttacgaaggatagggccaggcggatacctgggagaacagaattgcctgtgcagggtgtatggaggccctggggctggagcctgcggggcttcttccagggacagtgaggctggagatggactgcggagatgagggtctagaaggtggtggcggggcatgtggaccgttgtaagggctctggggttcctgggtgggctggcgaagtcctactcacagtgaccaaccatgatgatggtcccgatagaggaggagagggaggaggagggaaaaggaagggtgaggggctcagaggggagagctgggaggaggggagacataggtgggggaaggggtaggagaaaggggaagggagcaagagggtgaggggcaccaggccccatagacgttttggctcagcggccacgaggcctcctcagctcccgccccaaaacggaagcgaggccgtgggggcagcggcagcatggcggggcttgtcttggcggccatggccccgccccctgcccgtccgatcagcgccccgccccgtccccgccccgaccccgccccgggcccgctcaggccccgcccctgccgccggaatcctgaagcccaaggctgcccgggggcggtccggcggcgccggcgatggggcataaaaccactggccacctgccgggctgctcctgcgtgcgctgccgtcccggatccaccgtgcctctgcggcctgcgtgcccggagtccccgcctgtgtcgtctctgtcgccgtccccgtctcctgccaggcgcggagccctgcgagccgcgggtgggccccaggcgcgcagacatgggctgctccgccaaagcgcgctgggctgccggggcgctgggcgtcgcggggctactgtgcgctgtgctgggcgctgtcatgatcgtgatggtgccgtcgctcatcaagcagcaggtccttaaggt

SEQ ID NO: 13982 - DNA, 710 bp, Homo sapiens
gagctcacctctgttcagggaaacaggcgtggaaacacaatggtggtaaagaggaaagaggacaataggattgcatgaaggggatggaaagtgcccaggggaggaaatggttacatctgtgtgaggagtttggtgaggaaagactctaagagaaggctctgtctgtctgggtttggaaggatgtgtaggagtcttctagggggcacaggcacactccaggcataggtaaagatctgtaggtgtggcttgttgggatgaatttcaagtattttggaatgaggacagccatagagacaagggcaggagagaggcgatttaatagattttatgccaatggctccacttgagtttctgataagaacccagaacccttggactccccagtaacattgattgagttgtttatgatacctcatagaatatgaactcaaaggaggtcagtgagtggtgtgtgtgtgattctttgccaacttccaaggtggagaagcctcttccaactgcaggcagagcacaggtggccctgctactggctgcagctccagccctgcctccttctctagcatataaacaatccaacagcctcactgaatcactgctgtgcagggcaggaaagctccatgcacatagcccagcaaagagcaacacagagctgaaaggaagactcagaggagagagataagtaaggaaagtagtgatggctctcatcccag

SEQ ID NO: 13983 - DNA, 971 bp, Homo sapiens; identical to SEQ ID NO: 13976

SEQ ID NO: 13984 - DNA, 934 bp, Homo sapiens
cggtttaggagacagatggacagggctcgtaaaccccgccacctgccacccggcagcccttccatgttcctgtcctagctcagagggttgcatcccctgcccgggcggcagccctcgaaaaggagcaggctgctacctggggcgagaacaccctcagggagatgcaggtggtggcctgtgaggactgtgggatttgagtcccctcatgggcctccctgaggtctcactcctgtcccttgccccgtggggagctgatcagagaagagctgggtgcacacggatggggtttgggagaggcctgcaaaccctgagctccacagggtcccactcagagcctgtgaaaggcagggggctcccctccaagccagggcctcggccccaaagccctgtgaatcccagttctgaggggtggccaaggccaaggggcctggactggcaggttcagcagaaccaggggcagaacagtccacgtgccacatccttctctctggccaggagacatggatgcctgaccccagagggcccccgtcctgccctcccctccccggccccaccagggcctcagccccacattccacgcaggcctgcagctttaagccatccgctgggggctgccctgcaaactgctcgttccacattctcggggtggtggggtgggtggggtgcgggcacgccctcccgcggaggcctataagggtgcgggggggacggggcccaggaggggagtggagcctcaccagccacgtcctcatggccctgctgctcttgctgttcctgggcctcctggggctctgggggctgctctgcgcctgcgcccaagacccctccccagctgcccggtggcccccggggcctcgcccgctgccgctcgtcgggaacctgcacttgctgcgtctgtcgcaacaggaccggtccctgatggaggtaagtcagg

SEQ ID NO: 13985 - DNA, 788 bp, Homo sapiens
gagctcacctctgctaagggaaacaggcctggaaacacacaatggtggtaaagaggaaagaagacaatagaactgcatgaaggggatggaaagtgcccaggggaggaaatggttacttctgtgtgagggggttggtgaggaaagactctaagagaaggctctgtctggctgggtatgaaaggatgtgtaggagtcttctagggggcacaggcacactccaggcataggtaaagatctgtaggcatggcttgttgggatgagtttcaagtattctggaatgaggacagccatagagacaagaggagagttaatagattttatgccaatggctccacttgagtttgtgataagaacccagaacccttggactccccagtaacattgattgagttgtgtatgattctacatagaatattaactcaatggaggtcagtgagtggtgtgtgtgtgattatttgccaactgccgaggtggagaagcctcttccgactgcaggcagagcacgggggccctgctactggctgcagctccagccctgcctccttctccagcatataaacaatccaacagcctcactgaatcactgctgtgcagggcaggaaagctccacacacacagcccagcaaacagcagcacgctgctgaaaaaaagactcagaggagagagataaggaaggaaagtagtgatggatctcatcccaaacttggccgtggaaacctggcttctcctggctgtcagcctgatactcctctatctgtgagtaactgttcaggctcctcttctctgtt

SEQ ID NO: 13986 - DNA, 931 bp, Homo sapiens
caaagagcaacacagagctgaaaggaagactcagaggagagagataagtaaggaaagtagtgatggctctcatcccagacttggccatggaaacctggcttctcctggctgtcagcctggtgctcctctatctgtgagtaactgtccaggctcctcttctctgtttccttggacttggggtgctaatcaggcctctctttcccttatctgttttgaagatcaaaaaagatgttcaggccgggcgtggtggcttacacctgtaatcccagcactttgggaggctaaggcaagtggactgcctgaggtcaggagttcaagaccagcctggctaacatggtgaaactctgtctctactaaaaatacaaaaattagctgggcatggtggtgcacgcctgtattcccagctacttgggaggctgaggcaggagaattgcttgaacccggcaggcggaggttgcagtgagctgagatcatgccagtgcacttcagcctgggtgacagagtgaggctgtctcaaaaaaaaaaaaaaaaaaaaaagatgttcaaggagcagtagcttaagtgttggatgctacaaacatatagaggttattgtagatcttatgcagctctataaaggaataaataagcatcttccccatccatctttagtggcaagaagggttttgggatagcattgattgaggatgatctacttgacaatagtttggacccaaggaggataaggaaggaaagtagtgacggatctcattccaaacttggctgtggaaacctggcttctccttactaaactagaatttggattttacattttcccctttatgttgcagtagaagaggatgaatcctctcactggtgggatcctgccatcctagagcaggtagagagaagagtcactccccactgtgggtagtggaggcttctcacatgt

SEQ ID NO: 13987 - DNA, 1079 bp, Homo sapiens
aggaacatcactgcccttcataaattctagaaagttcattgcattcattattcacctttaaattcaaaactggaatttgatgatgattgcaactgcagctgagggccataaactaaaacaatttactgggtgtggaaaagggggctgggaagagccgtgggctaaccatcctgttaacaaggagtgtctcctcatgaaggtggcagccaccagaacgaggtgctgcctcctaccctacaaatagcaagggcccatgcaaatgaaaagtgagcctttgagatgagtctagataataatgcattggagatttcctgttaaactagcactcttaagaacatagtggcattttatttcaatcatagtataaaactcactggtttattcaattttattatattttagatgttggtattaatataccaagcaagattctttttaagttttctatttcccctttctaaaagctctatatcgggttcttcaattacattctcaaattatacaaatactacatgttttctgacaaataccgtattttggtaatgttaggctggaagtaaactagagtctttctgtaactttgacttatcctgcaatgtttggatgatgggacacatcaccctgggaactgtctcaaagcacaaccacatcttagggccctacgctcactccccaaaggcagatccgcctccaaaactccaaatcctcatggtctcaggcatcccttttaaacacgggcacaatcgtcacctctttgaaatgagagcgtgcttgattattcctggcctccagttgctggccttcatccggtgttggggtgggggagcctgtcggttcctgaaaaatagctcggggataactaagacaaaagaccctgaggagctctgcctcaactgtggcaagctgggtcttccacgtcaccaagtgtcattttcaccgtgcctgtatggtccgctgttcatcctgttagcggaccccgaaatcaggcaggaaaataaagctcagtgggagggcctcggagcaagacaatcccaccaagatggactcgggttgattaacgtgagtgaacctctgaggac

SEQ ID NO: 13988 - DNA, 1030 bp, Homo sapiens
tgatccttggcaccttaaatgattgattgccttcaataggcaaactgctggtctggaaatctcgttgaaggctgaatacttcatgcggagtaggacaagccttagcccaccttcaggttgaaaggaaaggccataggactcaaaagataatgactctgaaactaaactccttccttctgaagctgacagaggtacttagtgcatctcaagactccatctcataaaactcatttgtgagggatttgctctagatttttctaaacattttttcatctattgtccagacttgcaaatccagtgtggacctgatggagatacccttcacacctgcgctcccaccccctcggcagggagacgtctcagtagaggagaacacacccattatgctgggatttgtatttataaatcacttcccttttagggatgagcggtgtggggcgtgtgtgcgtgtgagtgtatgcgcgtgcgtgtgtgaccctcaagtgtactttgctcaatttagacgtgcagtatttccagaaacaatgaaaaaagtaagatgttttcttctttatgattctgctcaaaacaccacgtgccgcctcagagctttttctagagcctcggtcctcaatgacgcgcttgacctgttgatgcctcagcccagcgaagcccctcacctgtgccccgggcgacagctcttcagtgtgcagtgcaggcctggggtggactgccaggccttcgctctgtgccagcaacgccgttcttgttgctcctccatgaacaggggtacaagccctggcccctcctcgacactaagccccccacagactcagcctccaaggaaccgctgagcacccttgaagcatgtcattgtcagtgatacctttttattctatggaactctaacctattcgtgtcatattgaccttttgctgcatgagtcataaattatgaaatcagtcttacagtttttgaaatgtagccagcatttgtaaggctaaacctttttcatgaactgaatttaagtgaataaccaagccacagttcc

SEQ ID NO: 13989 - DNA, 1076 bp, Homo sapiens
tgggtgatctggaaggagttaaatttggtagtcatgggagacgcttctgtgaagccataggagcgaagattgattgtggcggcaggactgaactcagcttctgaatctttctagccgctaaacctacagactaagtggcgtccttggggaatgctgcctcaaacggctcgcgacgtcctaaaacatgtacatttattttggaaaatctgttttcgtaaaacctagcatacttaatcaccaacatttgttaacttcatggtggcatattaatacctgtcaggttgattttagttggagtgggacggggctgacctcaccgtcctacccttcggtatgaggccggcgtcttcacgacctcgcttttcacaaccccagtccccgagggcttatttggggctgtcggagtccccaagacgtggccccggagaagggtgaggtgccacagttcgaggtgccccagtaccctgcgtccggacagggggcggtgctcacgcccaaggccccgctgacgcgatgtaggccgagatcacctcaggcgctcgcggtgcaatcacagagcgcgccgtcgccgctcgagctcgccctgagatccctccgctcagcgccttcaacgccgtgtcccggcaccccgcacccgggcacacaaaaaacgggtcgcccgcgattctcagggattgatcgcctcttcaggtaagttatcttccggccccgtaccactgtgccacaggcgcagcccgcttcctcaggtgccctatcccgcgcaagaagaccacggcttcacagagtgttatttaaggggcgtggccagcggaacatcccgccccattctgtgacgcacggggtggcgcgcgtgggacccgaggggtggggctgggtttagtaggagacctggggcaaggccccctgtggacgaccatctgccagcttctctcgttccgtcgattgggaggagcggtggcgacctcggccttcagtgtttccgacggagtgaatggcggcggcggctgggatgctgctgctgggcttgctgcaggcgggtgggtcggtgctgggccaggcgatggagaaggtgacag

SEQ ID NO: 13990 - DNA, 977 bp, Homo sapiens
gttccccattctttcctcttctccaactagagtaatgacgcccaaacccgcacctatgcgcgcaggcaatcgggtgggtggacgcgcggccaccaaacccacagcaccgtcaccaaccctgggagggcacggccgggattaggaggagggggagcgcccacacctggggaggcaggtgcggaggcggccggcccggggacctcgagtgcgtaggactcggggtcggggtcggggtcggcaagccgggcgctgtgagcgcgtcggagcgctggcccggagcctggcagggggcgtctgtaccggctgggcagcccggggcggtggcgatggctggcggcggcggcggggtgtgcgccaggaggccatttcctcgctgcgcccctggcggagccgggtttgcctgctcttggccgccgccgccaccgccgcgcaagtcggacagccgtgagggctggaggggaaaccaggtcaccggttcgcagacgcggcgcggagcaggcgccccgggcccggagtaagacagcgcccgggaagcgggccggggcgggccgggcacgcgggggacccggagaggcggggactctggtgccccagccgcagtagcttcctacgcctataaaagtggagagaccggggaggtgcggcgcggccctggctgcggccgcctctcttcgcccaaggagttgacattttgcaggactcgcgcgacgcccagtcgccggcgctccccgggaccccgccgccgggaggagggggcggaggagggtggagactgcggggcttggccaaggaaggcgcacatcctcgggcgggcggccgtgacgcggcggggattaactttgcatgaataatgtgagtgcgcttggaaaagagacctcctgctccgcgggctcggggcaagagcccgcaggctaccttccccgggcaggggcgctcaacccaaccggctccagggcactggtaatttggctagagga

SEQ ID NO: 13991 - DNA, 944 bp, Homo sapiens
ctgctcttctcatctccatggttccagggaccccaagagaggtaccctcccctccgccaagcattacgaactccagtaccccctgtgaaagaagtggttccaacagcactgaggatgcaggtggctgagactaagacatgagcaagggcagcccaacttgggtaagctgtggctcagaatcccacactcgccaagtgactctgcccagtataaactgggcgattagccgagcagctccccctaacacacacacacttacacacacacacactcacacacacacccctccccaagagcagactatgtagccagggccccaccctgagagccgtgggaaggctgtggcccccgctggtaaaactgggctaatgacagcaggggaaccggcggggccaggggggtgctggggtaattagggctcggcctggcgctaggagatcctgagatgaaaggtgctctggcgtcactgggttggttttatgtccatgaatgcaggtgtgtggtgtgtgtatgtgtgtgctgggggtggggctggcatggtggagacctctcctttgggttgggttagggggtccatttgtatgcagcccaccgtcttccttagattgactctggtaccatttggatttttgtgggagcaaacatggggggaaataccaccacccgggagctaggaattgagggggtatggcagatcttgtcccctccccgagctcaggagagggagcagattgttgggggaaatggctggtgacagagaatagaaagagcctatatggagaagggtgacgttggaaaagggaggcagtggatcggtattgatgttagaaatgagaggggagggaggtaacagggaatgaacccccacaaggatgaaaaacgtaagatgattgaagttaaaaggacatcaggggtcacctgcccagccctcgcagctgaagctt

SEQ ID NO: 13992 - DNA, 1075 bp, Homo sapiens; identical to SEQ ID NO: 13272

SEQ ID NO: 13993 - DNA, 1038 bp, Homo sapiens
caagtactgggagcacagcttttaaaatacatcatgaatgctttaatacaggaatgaatagatgagaggcacaaactggttgggtgttcttctgatacacagtatcttccttgacagattcagtacaactctcaacaggtaagtctcttcatgttatgttaccttatgaggaattaagtggcagaacatgatttctattattttcctttgcagaacaagaccaactttattagttgggacacagtgtggctgcatttgagtcccaagcaaccattagtctattgctatcaccacagagtcagaggggatgagacgcccagcaatctcacccaagacaactccaccaacattcctggttacccaccatgtgtacagtaccctgctaggaaccagggtcatgaaagtaaataataccagactgtgcccttgaggagctcacctctgctaagggaaacaggcatagaaacttacaatggtggtagagagaaaagaggacaataggactgtgtgagggggataggaggcacccagaggaggaaatggttacatttgtgtgaggaggttggtaaggaaaaattttagcagaaggggtctgtctggctgggcttggaaggatacgtaggagtcatctagagggcacaggtacactccaggcagagggaatttcgtgggtaaagatgtgtaggtgtggcttgtgaggatggatttcaattattctagaatgaaggcagccatggaggggcaggtgagaggagggttaatagatttcatgccaatggctccacttgagtttctgataagaacccagaacccttggactccccgataacactgattaagcttttcatgattcctcatagaacatgaactcaaaagaggtcagcaaaggggtgtgtgcgattctttgctattggctgcagctatagccctgcctccttctccagcacataaatctttcagcagcttggctgaagactgctgtgcagggcagggaagctccaggcaaacagcccagcaaacagcagcactcagctaaaa

SEQ ID NO: 13994 - DNA, 974 bp, Homo sapiens
gagtcaagtcgaatggctcagattgtaagtgctatgagaattccactgtaagaagagggaagtatgccttcttttcaccattaaagatctgattgctgatattggcatttttgccagtagaagagcctggacgttggcagttttcaaagcccccaggtgatttgactgcgcagctaagtttgagaaccacggaggtaaaggaagggagtaccttaaagagctaggattagggataatatcaatagatcacctttaaggctgcacctcagcctaattaaatcagaatcgctgggggtgggacttggctatcagtcatctttaaagctctccaagtgattccaatgtacagacgtggttgagagccattgctttacttgaattctcagtggttcttaatcctggcagcataatagagtcaccaaagatacatatatatatatcagttcaggaagcagagttgtttcagatgctagaacacctccaacgagcagtcacagctctgtagttctagtgccgccgctgccagcaagtttgttgtgaccctggcggccgagttactttcagcgctctgggcggtctcgcaagaaacactgacgctttgggacttcatttcccagcaagacccgcggccgcctatcgcgcgagtcatgccgggcacctcgtccccctgtcctctctggcggagctgcctggcggaagcgggaacgtcgcatcctgaggtaaaggtgcacggcatcctgggacatgtagtctggccggggctcggacgccccctcggatgaatgggaccgaagctgactgcgaactacagcttcttggcagcgtcggtgttggccgcgggagaaggggagaccgcggcggcccccagtgagagcggctttccaggacggtgcgatgtgctgcgcagcgaagaggcaggaggccggcttcctggggtagcggtacaggcgggcgcttactctgtgcgcttgctt
